(19) United States
(12) Patent Application Publication
(10) Pub. No.: US 2024/0132908 A1
(43) Pub. Date: Apr. 25, 2024

(54) PEST AND PATHOGEN RESISTANT SOYBEAN PLANTS

(71) Applicant: INARI AGRICULTURE TECHNOLOGY, INC., Cambridge, MA (US)

(72) Inventors: Frédéric Van Ex, Kortrijk (BE); Katalin Tóth, Cambridge, MA (US)

(21) Appl. No.: 18/255,671

(22) PCT Filed: Dec. 3, 2021
(86) PCT No.: PCT/US2021/061761

§ 371 Date: Jun. 2, 2023

Related U.S. Application Data
(60) Provisional application No. 63/120,844, filed on Dec. 3, 2020.

(51) Int. Cl. C12N 15/82

(52) U.S. Cl. CPC C12N 15/8282; C12N 15/8279; C12N 15/8285; C12N 15/8286

(57) ABSTRACT

The disclosure relates to novel soybean plants and seeds with pest and pathogen resistance and related compositions. The disclosure further relates to use of the soybean plants and seeds in breeding, seed production, and commodity product production.

### CROSS-REFERENCE TO RELATED APPLICATIONS

[0001] This international patent application claims the benefit of U.S. provisional patent application Ser. No. 63/120,844, filed Dec. 3, 2020.

### INCORPORATION OF SEQUENCE LISTING

[0002] A sequence listing contained in the file named “10084WO1_ST25.txt” which comprises 781 sequences, is electronically filed herewith and is incorporated herein by reference in its entirety.

### FIELD

[0003] Disclosed herein are novel soybean plant cells, soybean plants and soybean seeds derived from such plant cells and having improved pest and pathogen resistance traits, and methods of making and using such plant cells and derived plants and seeds.

### BACKGROUND

[0004] Plant breeding and engineering has until recently relied on Mendelian genetics or transgene insertion techniques. More recently, plant breeding has further incorporated gene editing techniques. Methods of using CRISPR, Zinc Finger Nuclease, and Transcription activator like effector Nuclease (TALEN) technology for genome editing in plants are disclosed in US 20150082478, US 2015/0059010A 1 and Bortesi et al., 2015, Biotechnology Advances, pp. 41-52. Vol. 33. No. 1. Ellis et al., 1987, EMBO J. (6):11:3203-3208, disclose a 16 base pair bacterial octopine synthase gene enhancer element that could increase expression of exogenous genes in maize and tobacco protoplasts in transient expression assays. PCT Patent Application WO 2018/140899 discloses insertion of expression-enhancing elements with homology to the bacterial octopine synthase gene enhancer element in the promoter region of a maize Lc gene in a maize protoplast genome to increase expression of that gene.

[0005] US Patent Application US20160194657 and Nagaki et al. Plant Biotech. J, doi: 10.1111/pbi.13479 (2020) disclose transgene-mediated overexpression of the soybean GmDR1 protein in transgenic soybean plants and enhanced immunity against F. virguliforme, soybean cyst nematode (SCN), spider mite, and soybean aphid infections.

### SUMMARY

[0006] Disclosed herein are methods for providing novel soybean plant cells or soybean plant protoplasts, plant callus, tissues or parts, whole soybean plants, and soybean seeds having one or more altered genetic sequences. Among other features, the methods and compositions described herein enable the stacking of preferred alleles without introducing unwanted genetic or epigenetic variation in the modified plants or plant cells. The efficiency and reliability of these targeted modification methods are significantly improved relative to traditional plant breeding, and can be used not only to augment traditional breeding techniques but also as a substitute for them.

[0007] Modified soybean plants comprising at least one targeted modification in an endogenous GmDR1 gene resulting in increased expression of the endogenous GmDR1 gene relative to a reference plant lacking the modification are provided, wherein the targeted modification in the GmDR1 gene comprises an insertion, replacement, and/or deletion of one or more nucleotides in the GmDR1 gene, and wherein the increase of expression in the GmDR1 gene results in an improvement in resistance to a pest or pathogen in the modified soybean plant relative to the reference plant lacking the modification are provided. Modified soybean plant cells comprising the targeted modification(s) in the endogenous GmDR1 gene and tissue cultures of such cells are also provided. Modified soybean plant parts, including seeds, leaves, pods, stems, and roots, containing a chromosome comprising the targeted modification(s) in the endogenous GmDR1 gene are also provided. Soybean seed meal comprising a DNA molecule containing the targeted modification(s) in the endogenous GmDR1 gene, optionally wherein the seed meal is non-regenerable, is also provided. DNA molecules comprising the modified endogenous soybean GmDR1 gene containing the targeted modification(s) in the endogenous GmDR1 gene and at least 100 base pairs of adjoining endogenous soybean chromosomal DNA located centromere-proximal and telomere-proximal to the modified endogenous soybean GmDR1 gene are provided. Biological samples comprising the DNA molecules are also provided. Use of the aforementioned modified soybean plants or seed obtained therefrom comprising at least one targeted modification in an endogenous GmDR1 gene to: (a) grow a soybean plant with improved pest and/or plant pathogen resistance in comparison to a soybean plant lacking the modification; (b) harvest a lot of soybean plant seed comprising the targeted modifications; (c) produce a commodity product; or (d) breed soybean plants with improved pest and/or plant pathogen resistance in comparison to a soybean plant lacking the modification is also provided.

[0008] Methods of soybean seed production comprising crossing any of the aforementioned modified soybean plants comprising at least one targeted modification in an endogenous GmDR1 gene and optionally harvesting the seed are provided. Methods of soybean seed production comprising allowing to self or selfing any of the aforementioned modified soybean plants comprising at least one targeted modification in an endogenous GmDR1 gene to produce plant seed and optionally harvesting the seed are provided. Methods of producing a plant comprising an added desired trait comprising introducing a transgene conferring the desired trait into the aforementioned modified soybean plants comprising at least one targeted modification in an endogenous GmDR1 gene are provided. Methods of producing a commodity soybean plant product comprising processing a modified soybean seed obtained from the aforementioned modified soybean plants comprising at least one targeted modification in an endogenous GmDR1 gene and recovering the commodity plant product from the processed plant or seed are provided. Methods of producing soybean plant material comprising growing the aforementioned modified soybean plants comprising at least one targeted modification in an endogenous GmDR1 gene are provided. Methods of producing plant material comprising: (a) providing an aforementioned modified soybean plant comprising at least one targeted modification in an endogenous GmDR1 gene; and, (b) growing the modified soybean plant under conditions that allow for expression of the endogenous soybean GmDR1 gene at levels that exceed expression levels of the endogenous soybean GmDR1 gene in a reference soybean plant which lacks the modifications are provided. Methods of producing a treated soybean plant seed comprising contacting a soybean seed containing a chromosome comprising targeted modification(s) in the endogenous GmDR1 gene with a composition comprising a biological agent, insecticide, or fungicide are provided. Methods of identifying a biological sample comprising a DNA molecule containing the targeted modification(s) in the endogenous GmDR1 gene comprising the step of detecting the presence of the DNA molecule in the biological sample are provided. Methods of increasing the expression of an endogenous GmDR1 gene in a soybean plant comprising introducing targeted modification(s) in the endogenous GmDR1 gene, wherein the targeted modification in the GmDR1 gene comprises an insertion, replacement, and/or deletion of one or more nucleotides in the GmDR1 gene are provided.

[0009] In one aspect, the disclosure provides a method of changing expression of a sequence of interest in a genome, wherein the sequence includes an endogenous GmDR1 gene and/or other gene set forth in Table 10, including integrating a sequence encoded by a polynucleotide, such as a double-stranded or single-stranded polynucleotides including DNA. RNA, or a combination of DNA and RNA, at the site of at least one double-strand break (DSB) in a genome, which can be the genome of a eukaryotic nucleus (e. g., the nuclear genome of a plant cell) or a genome of an organelle (e. g., a mitochondrion or a plastid in a plant cell). Effector molecules for site-specific introduction of a DSB into a genome include various endonucleases (e. g., RNA-guided nucleases such as a type II Cas nuclease, a Cas9. Cas12j, a type V Cas nuclease, a Cpf1, a CasY, a CasX, a C2c1, or a C2c3) and guide RNAs that direct cleavage by an RNA-guided nuclease. Embodiments include those where the DSB is introduced into a genome by a ribonucleoprotein complex containing both a site-specific nuclease (e. g., Cas9, Cas12j, Cpf1, CasX, CasY, C2c1, C2c3) and at least one guide RNA, or by a site-specific nuclease in combination with at least one guide RNA; in some of these embodiments no plasmid or other expression vector is utilized to provide the nuclease, the guide RNA, or the polynucleotide. These effector molecules are delivered to the cell or organelle wherein the DSB is to be introduced by the use of one or more suitable composition or treatment, such as at least one chemical, enzymatic, or physical agent, or application of heat or cold, ultrasonication, centrifugation, electroporation, particle bombardment, and bacterially mediated transformation. It is generally desirable that the DSB is induced at high efficiency. One measure of efficiency is the percentage or fraction of the population of cells that have been treated with a DSB-inducing agent and in which the DSB is successfully introduced at the correct site in the genome. The efficiency of genome editing is assessed by any suitable method such as a heteroduplex cleavage assay or by sequencing, as described elsewhere in this disclosure. In various embodiments, the DSB is introduced at a comparatively high efficiency, e. g., at about 20, about 30, about 40, about 50, about 60, about 70, or about 80 percent efficiency, or at greater than 80, 85, 90, or 95 percent efficiency. In embodiments, the DSB is introduced upstream of, downstream of, or within the sequence of interest, which is coding, non-coding, or a combination of coding and non-coding sequence. In embodiments, a sequence encoded by the polynucleotide (such as a double-stranded DNA, a single-stranded DNA, a single-stranded DNA/RNA hybrid, or a double-stranded DNA/RNA hybrid), when integrated into the site of the DSB in the genome, is then functionally or operably linked to the sequence of interest, e. g., linked in a manner that modifies the transcription or the translation of the sequence of interest or that modifies the stability of a transcript including that of the sequence of interest. Embodiments include those where two or more DSBs are introduced into a genome, and wherein a sequence encoded by a polynucleotide (such as a double-stranded DNA, a single-stranded DNA, a single-stranded DNA/RNA hybrid, or a double-stranded DNA/RNA hybrid) that is integrated into each DSB is the same or different for each of the DSBs. In embodiments, at least two DSBs are introduced into a genome by one or more nucleases in such a way that genomic sequence (coding, non-coding, or a combination of coding and non-coding sequence) is deleted between the DSBs (leaving a deletion with blunt ends, overhangs or a combination of a blunt end and an overhang), and a sequence encoded by a polynucleotide (such as a double-stranded DNA, a single-stranded DNA, a single-stranded DNA/RNA hybrid, or a double-stranded DNA/RNA hybrid) molecule is integrated between the DSBs (i. e., at the location of the deleted genomic sequence). The method is particularly useful for integrating into the site of a DSB a heterologous nucleotide sequence that provides a useful function or use. For example, the method is useful for integrating or introducing into the genome a heterologous sequence that stops or knocks out expression of a sequence of interest (such as a gene encoding a protein), or a heterologous sequence that is a unique identifier nucleotide sequence, or a heterologous sequence that is (or that encodes) a sequence recognizable by a specific binding agent or that binds to a specific molecule, or a heterologous sequence that stabilizes or destabilizes a transcript containing it. Embodiments include use of the method to integrate or introduce into a genome sequence of a promoter or promoter-like element (e. g., sequence of an auxin-binding or hormone-binding or transcription-factor-binding element, or sequence of or encoding an aptamer or riboswitch), or a sequence-specific binding or cleavage site sequence (e. g., sequence of or encoding an endonuclease cleavage site, a small RNA recognition site, a recombinase site, a splice site, or a transposon recognition site). In embodiments, the method is used to delete or otherwise modify to make non-functional an endogenous functional sequence, such as a hormone- or transcription-factor-binding element, or a small RNA or recombinase or transposon recognition site. In embodiments, additional molecules are used to effect a desired expression result or a desired genomic change. For example, the method is used to integrate heterologous recombinase recognition site sequences at two DSBs in a genome, and the appropriate recombinase molecule is employed to excise genomic sequence located between the recombinase recognition sites. In another example, the method is used to integrate a polynucleotide-encoded heterologous small RNA recognition site sequence at a DSB in a sequence of interest in a genome, wherein when the small RNA is present (e. g., expressed endogenously or transiently or transgenically), the small RNA binds to and cleaves the transcript of the sequence of interest that contains the integrated small RNA recognition site. In another example, the method is used to integrate in the genome of a soybean plant or plant cell a polynucleotide-encoded promoter or promoter-like element that is responsive to a specific molecule (e. g., an auxin, a hormone, a drug, an herbicide, or a polypeptide), wherein a specific level of expression of the sequence of interest is obtained by providing the corresponding specific molecule to the plant or plant cell; in a non-limiting example, an auxin-binding element is integrated into the promoter region of a protein-coding sequence in the genome of a plant or plant cell, whereby the expression of the protein is upregulated when the corresponding auxin is exogenously provided to the plant or plant cell (e. g., by adding the auxin to the medium of the plant cell or by spraying the auxin onto the plant). Another aspect of the disclosure is a soybean cell including in its genome a heterologous DNA sequence, wherein the heterologous sequence includes (a) nucleotide sequence of a polynucleotide integrated by the method at the site of a DSB in the genome, and (b) genomic nucleotide sequence adjacent to the site of the DSB; related aspects include a plant containing such a cell including in its genome a heterologous DNA sequence, progeny seed or plants (including hybrid progeny seed or plants) of the plant, and processed or commodity products derived from the plant or from progeny seed or plants. In another aspect, the disclosure provides a heterologous nucleotide sequence including (a) nucleotide sequence of a polynucleotide (such as a double-stranded DNA, a single-stranded DNA, a single-stranded DNA/RNA hybrid, or a double-stranded DNA/RNA hybrid) molecule integrated by the method at the site of a DSB in a genome, and (b) genomic nucleotide sequence adjacent to the site of the DSB; related aspects include larger polynucleotides such as a plasmid, vector, or chromosome including the heterologous nucleotide sequence, as well as a polymerase primer for amplification of the heterologous nucleotide sequence.

[0010] In another aspect, the disclosure provides a composition including a plant cell and a polynucleotide (such as a double-stranded DNA, a single-stranded DNA, a single-stranded DNA/RNA hybrid, or a double-stranded DNA/RNA hybrid) donor molecule that is capable of being integrated at (or having its sequence integrated at) a double-strand break in genomic sequence in the plant cell, wherein the genomic sequence includes an endogenous GmDR1 gene and/or other gene set forth in Table 10. In various embodiments, the plant cell is an isolated plant cell or plant protoplast, or is in a monocot plant or dicot plant, a zygotic or somatic embryo, seed, plant part, or plant tissue. In embodiments the plant cell is capable of division or differentiation. In embodiments the plant cell is haploid, diploid, or polyploid. In embodiments, the plant cell includes a double-strand break (DSB) in its genome, at which DSB site the polynucleotide donor molecule is integrated using methods disclosed herein. In embodiments, at least one DSB is induced in the plant cell's genome by including in the composition a DSB-inducing agent, for example, various endonucleases (e. g., RNA-guided nucleases such as a type II Cas nuclease, a Cas9, a type V Cas nuclease, a Cpf1, a CasY, a CasX, a C2c1, C2c3, or a Cas12j nuclease) and guide RNAs that direct cleavage by an RNA-guided nuclease; the dsDNA molecule is integrated into the DSB thus induced using methods disclose herein. Specific embodiments include compositions including a plant cell, at least one dsDNA molecule, and at least one ribonucleoprotein complex containing both a site-specific nuclease (e. g., Cas9, Cpf1, CasX, CasY, C2c1, C2c3, Cas12j) and at least one guide RNA; in some of these embodiments, the composition contains no plasmid or other expression vector for providing the nuclease, the guide RNA, or the dsDNA. In embodiments of the composition, the polynucleotide donor molecule is double-stranded DNA or RNA or a combination of DNA and RNA, and is blunt-ended, or contains one or more terminal overhangs, or contains chemical modifications such as phosphorothioate bonds or a detectable label. In other embodiments, the polynucleotide donor molecule is a single-stranded polynucleotide composed of DNA or RNA or a combination of DNA or RNA, and can further be chemically modified or labelled. In various embodiments of the composition, the polynucleotide donor molecule includes a nucleotide sequence that provides a useful function when integrated into the site of the DSB. For example, in various non-limiting embodiments the polynucleotide donor molecule includes: sequence that is recognizable by a specific binding agent or that binds to a specific molecule or encodes an RNA molecule or an amino acid sequence that binds to a specific molecule, or sequence that is responsive to a specific change in the physical environment or encodes an RNA molecule or an amino acid sequence that is responsive to a specific change in the physical environment, or heterologous sequence, or sequence that serves to stop transcription or translation at the site of the DSB, or sequence having secondary structure (e. g., double-stranded stems or stem-loops) or than encodes a transcript having secondary structure (e. g., double-stranded RNA that is cleavable by a Dicer-type ribonuclease). In particular embodiments, the modifications to the soybean cell or plant will affect the activity or expression of one or more genes or proteins listed in Table 5, and in some embodiments two or more of those genes or proteins. In related embodiments, the activity or expression of one or more genes or proteins listed in Table 10, including an endogenous GmDR1 gene, will be altered by the introduction or creation of one or more of the regulatory sequences listed in Table 9.

[0011] In another aspect, the disclosure provides a reaction mixture including: (a) a soybean plant cell having at least one double-strand break (DSB) at a locus in its genome; and (b) a polynucleotide (such as a double-stranded DNA, a single-stranded DNA, a single-stranded DNA/RNA hybrid, or a double-stranded DNA/RNA hybrid) donor molecule capable of being integrated at (or having its sequence integrated at) the DSB (preferably by non-homologous end-joining (NHEJ)), wherein the polynucleotide donor molecule has a length of between about 18 to about 300 base-pairs (or nucleotides, if single-stranded), or between about 30 to about 100 base-pairs (or nucleotides, if single-stranded); wherein the polynucleotide donor molecule includes a sequence which, if integrated at the DSB, forms a heterologous insertion (wherein the sequence of the polynucleotide molecule is heterologous with respect to the genomic sequence flanking the insertion site or DSB). In embodiments of the reaction mixture, the plant cell is an isolated plant cell or plant protoplast. In various embodiments, the plant cell is an isolated plant cell or plant protoplast, or is in a monocot plant or dicot plant, a zygotic or somatic embryo, seed, plant part, or plant tissue. In embodiments the plant cell is capable of division or differentiation. In embodiments the plant cell is haploid, diploid, or polyploid. In embodiments of the reaction mixture, the polynucleotide donor molecule includes a nucleotide sequence that provides a useful function or use when integrated into the site of the DSB. For example, in various non-limiting embodiments the polynucleotide donor molecule includes: sequence that is recognizable by a specific binding agent or that binds to a specific molecule or encodes an RNA molecule or an amino acid sequence that binds to a specific molecule, or sequence that is responsive to a specific change in the physical environment or encodes an RNA molecule or an amino acid sequence that is responsive to a specific change in the physical environment, or heterologous sequence, or sequence that serves to stop transcription or translation at the site of the DSB, or sequence having secondary structure (e. g., double-stranded stems or stem-loops) or than encodes a transcript having secondary structure (e. g., double-stranded RNA that is cleavable by a Dicer-type ribonuclease).

[0012] In another aspect, the disclosure provides a polynucleotide for disrupting gene expression, wherein the polynucleotide is double-stranded and includes at least 18 contiguous base-pairs and encoding at least one stop codon in each possible reading frame on each strand, or is single-stranded and includes at least 11 contiguous nucleotides; and wherein the polynucleotide encodes at least one stop codon in each possible reading frame on each strand. In embodiments, the polynucleotide is a double-stranded DNA (dsDNA) or a double-stranded DNA/RNA hybrid molecule including at least 18 contiguous base-pairs and encoding at least one stop codon in each possible reading frame on either strand. In embodiments, the polynucleotide is a single-stranded DNA or a single-stranded DNA/RNA hybrid molecule including at least 11 contiguous nucleotides and encoding at least one stop codon in each possible reading frame on the strand. Such a polynucleotide is especially useful in methods disclosed herein, wherein, when a sequence encoded by the polynucleotide is integrated or inserted into a genome at the site of a DSB in a sequence of interest (such as a protein-coding gene), the sequence of the heterologously inserted polynucleotide serves to stop translation of the transcript containing the sequence of interest and the heterologously inserted polynucleotide sequence. Embodiments of the polynucleotide include those wherein the polynucleotide includes one or more chemical modifications or labels, e. g., at least one phosphorothioate modification.

[0013] In another aspect, the disclosure provides a method of identifying the locus of at least one double-stranded break (DSB) in genomic DNA in a cell (such as a plant cell) including the genomic DNA, wherein the genomic DNA includes an endogenous GmDR1 gene and/or other gene set forth in Table 10, wherein the method includes the steps of: (a) contacting the genomic DNA having a DSB with a polynucleotide (such as a double-stranded DNA, a single-stranded DNA, a single-stranded DNA/RNA hybrid, or a double-stranded DNA/RNA hybrid) donor molecule, wherein the polynucleotide donor molecule is capable of being integrated (or having its sequence integrated) at the DSB (preferably by non-homologous end-joining (NHEJ)) and has a length of between about 18 to about 300 base-pairs (or nucleotides, if single-stranded), or between about 30 to about 100 base-pairs (or nucleotides, if single-stranded); wherein a sequence encoded by the polynucleotide donor molecule, if integrated at the DSB, forms a heterologous insertion; and (b) using at least part of the sequence of the polynucleotide molecule as a target for PCR primers to allow amplification of DNA in the locus of the DSB. In a related aspect, the disclosure provides a method of identifying the locus of double-stranded breaks (DSBs) in genomic DNA in a pool of cells (such as plant cells or plant protoplasts), wherein the pool of cells includes cells having genomic DNA with a sequence encoded by a polynucleotide donor molecule inserted at the locus of the double stranded breaks; wherein the polynucleotide donor molecule is capable of being integrated (or having its sequence integrated) at the DSB and has a length of between about 18 to about 300 base-pairs (or nucleotides, if single-stranded), or between about 30 to about 100 base-pairs (or nucleotides, if single-stranded); wherein a sequence encoded by the polynucleotide donor molecule, if integrated at the DSB, forms a heterologous insertion; and wherein the sequence of the polynucleotide donor molecule is used as a target for PCR primers to allow amplification of DNA in the region of the double-stranded breaks. In embodiments, the pool of cells is a population of plant cells or plant protoplasts, wherein at least some of the cells contain multiple or different DSBs in the genome, each of which can be introduced into the genome by a different guide RNA.

[0014] In another aspect, the disclosure provides a method of identifying the nucleotide sequence of a locus in the genome that is associated with a phenotype, optionally wherein the locus in the genome comprises an endogenous GmDR1 gene and the phenotype is resistance to a pest or pathogen; and/or other gene and phenotype set forth in Table 10. In certain embodiments, the method includes the steps of: (a) providing to a population of cells having the genome: (i) multiple different guide RNAs (gRNAs) to induce multiple different double strand breaks (DSBs) in the genome, wherein each DSB is produced by an RNA-guided nuclease guided to a locus on the genome by one of the gRNAs, and (ii) polynucleotide (such as double-stranded DNA, single-stranded DNA, single-stranded DNA/RNA hybrid, and double-stranded DNA/RNA hybrid) donor molecules having a defined nucleotide sequence, wherein the polynucleotide donor molecules are capable of being integrated (or having their sequence integrated) into the DSBs by non-homologous end-joining (NHEJ); whereby when at least a sequence encoded by some of the polynucleotide donor molecules are inserted into at least some of the DSBs, a genetically heterogeneous population of cells is produced; (b) selecting from the genetically heterogeneous population of cells a subset of cells that exhibit a phenotype of interest; (c) using a pool of PCR primers that bind to at least part of the nucleotide sequence of the polynucleotide donor molecules to amplify from the subset of cells DNA from the locus of a DSB into which one of the polynucleotide donor molecules has been inserted; and (d) sequencing the amplified DNA to identify the locus associated with the phenotype of interest. In embodiments of the method, the gRNA is provided as a polynucleotide, or as a ribonucleoprotein including the gRNA and the RNA-guided nuclease. Related aspects include the cells produced by the method and pluralities, arrays, and genetically heterogeneous populations of such cells, as well as the subset of cells in which the locus associated with the phenotype has been identified, and callus, seedlings, plantlets, and plants and their seeds, grown or regenerated from such cells.

[0015] In another aspect, the disclosure provides a method of modifying a plant cell by creating a plurality of targeted modifications in the genome of the plant cell, wherein the method comprises contacting the genome with one or more targeting agents, wherein the one or more agents comprise or encode predetermined peptide or nucleic acid sequences, wherein the predetermined peptide or nucleic acid sequences bind preferentially at or near predetermined target sites within the plant genome, and wherein the binding directs or facilitates the generation of the plurality of targeted modifications within the genome; wherein the plurality of targeted modifications occurs without an intervening step of separately identifying an individual modification and without a step of separately selecting for the occurrence of an individual modification among the plurality of targeted modifications mediated by the targeting agents; and wherein the targeted modifications alter at least one trait of the plant cell, or at least one trait of a plant comprising the plant cell, or at least one trait of a plant grown from the plant cell, or result in a detectable phenotype in the modified plant cell; and wherein at least two of the targeted modifications are insertions of predetermined sequences encoded by one or more polynucleotide donor molecules, and wherein at least one of the polynucleotide donor molecules lacks homology to the genome sequences adjacent to the site of insertion. In a related embodiment, at least one of the polynucleotide donor molecules used in the method is a single stranded DNA molecule, a single stranded RNA molecule, a single stranded DNA-RNA hybrid molecule, or a duplex RNA-DNA molecule. In another related embodiment, wherein the modified plant cell of the method is a meristematic cell, embryonic cell, or germline cell. In yet another related embodiment, the methods described in this paragraph, when practiced repeatedly or on a pool of cells, result in an efficiency of at least 1%, e.g., at least 2%, 5%, 7%, 10%, 15%, 20%, 25%, 30%, 35% or more, wherein said efficiency is determined, e.g., by dividing the number of successfully targeted cells by the total number of cells targeted.

[0016] In another embodiment, the disclosure provides a method of modifying a plant cell by creating a plurality of targeted modifications in the genome of the plant cell, comprising: contacting the genome with one or more targeting agents, wherein the one or more agents comprise or encode predetermined peptide or nucleic acid sequences, wherein the predetermined peptide or nucleic acid sequences bind preferentially at or near predetermined target sites within the plant genome, and wherein the binding directs or facilitates the generation of the plurality of targeted modifications within the genome; wherein the plurality of targeted modifications occurs without an intervening step of separately identifying an individual modification and without a step of separately selecting for the occurrence of an individual modification among the plurality of targeted modifications mediated by the targeting agents; and wherein the targeted modifications improve at least one trait of the plant cell, or at least one trait of a plant comprising the plant cell, or at least one trait of a plant grown from the plant cell, or result in a detectable phenotype in the modified plant cell; and wherein at least one of the targeted modifications is an insertion of a predetermined sequence encoded by one or more polynucleotide donor molecules, and wherein at least one of the polynucleotide donor molecules is a single stranded DNA molecule, a single stranded RNA molecule, a single stranded DNA-RNA hybrid molecule, or a duplex RNA-DNA molecule. In a related embodiment, at least one of the polynucleotide donor molecules used in the method lacks homology to the genome sequences adjacent to the site of insertion. In another related embodiment, the modified plant cell is a meristematic cell, embryonic cell, or germline cell. In yet another related embodiment, repetition of the methods described in this paragraph result in an efficiency of at least 1%, e.g., at least 2%, 5%, 7%, 10%, 15%, 20%, 25%, 30%, 35% or more, wherein said efficiency is determined by dividing the number of successfully targeted cells by the total number of cells targeted. In a related embodiment, the targeted plant cell has a ploidy of 2n, with n being a value selected from the group consisting of 0.5, 1, 1.5, 2, 2.5, 3, 3.5, 4, 5, and 6, wherein the method generates 2n targeted modifications at 2n loci of the predetermined target sites within the plant cell genome; and wherein 2n of the targeted modifications are insertions or creations of predetermined sequences encoded by one or more polynucleotide donor molecules.

[0017] In another embodiment, the disclosure provides a method of modifying a plant cell by creating a plurality of targeted modifications in the genome of the plant cell, comprising: contacting the genome with one or more targeting agents, wherein the one or more agents comprise or encode predetermined peptide or nucleic acid sequences, wherein the predetermined peptide or nucleic acid sequences bind preferentially at or near predetermined target sites within the plant genome, and wherein the binding directs the generation of the plurality of targeted modifications within the genome; wherein the plurality of modifications occurs without an intervening step of separately identifying an individual modification and without a step of separately selecting for the occurrence of an individual modification among the plurality of targeted modifications mediated by the targeting agents; wherein the targeted modifications improve at least one trait of the plant cell, or at least one trait of a plant comprising the plant cell, or at least one trait of a plant or seed obtained from the plant cell, or result in a detectable phenotype in the modified plant cell; and wherein the modified plant cell is a meristematic cell, embryonic cell, or germline cell. In a related embodiment, at least one of the targeted modifications is an insertion of a predetermined sequence encoded by one or more polynucleotide donor molecules, and wherein at least one of the polynucleotide donor molecules is a single stranded DNA molecule, a single stranded RNA molecule, a single stranded DNA-RNA hybrid molecule, or a duplex RNA-DNA molecule. In yet another related embodiment, at least one of the polynucleotide donor molecules lacks homology to the genome sequences adjacent to the site of insertion. In yet another embodiment related to the methods of this paragraph, repetition of the method results in an efficiency of at least 1%, e.g., at least 2%, 5%, 7%, 10%, 15%, 20%, 25%, 30%, 35% or more, wherein said efficiency is determined by dividing the number of successfully targeted cells by the total number of cells targeted.

[0018] In another embodiment, the disclosure provides a method of modifying a soybean plant cell by creating a plurality of targeted modifications in the genome of the plant cell, comprising: contacting the genome with one or more targeting agents, wherein the one or more agents comprise or encode predetermined peptide or nucleic acid sequences, wherein the predetermined peptide or nucleic acid sequences bind preferentially at or near predetermined target sites within the plant genome, and wherein the binding directs the generation of the plurality of targeted modifications within the genome; wherein the plurality of modifications occurs without an intervening step of separately identifying an individual modification and without a step of separately selecting for the occurrence of an individual modification among the plurality of targeted modifications mediated by the targeting agents; and wherein the targeted modifications improve at least one trait of the plant cell, or at least one trait of a plant comprising the plant cell, or at least one trait of a plant or seed obtained from the plant cell, or result in a detectable phenotype in the modified plant cell; and wherein repetition of the aforementioned steps results in an efficiency of at least 1%, e.g., at least 2%, 5%, 7%, 10%, 15%, 20%, 25%, 30%, 35% or more, wherein said efficiency is determined by dividing the number of successfully targeted cells by the total number of cells targeted. In a related embodiment, the modified plant cell is a meristematic cell, embryonic cell, or germline cell. In another related embodiment, at least one of the targeted modifications is an insertion of a predetermined sequence encoded by one or more polynucleotide donor molecules, and wherein at least one of the polynucleotide donor molecules is a single stranded DNA molecule, a single stranded RNA molecule, a single stranded DNA-RNA hybrid molecule, or a duplex RNA-DNA molecule. In yet another related embodiment of the methods of this paragraph, at least one of the polynucleotide donor molecules used in the method lacks homology to the genome sequences adjacent to the site of insertion.

[0019] In various embodiments of the methods described above, at least one of the targeted modifications is an insertion between 3 and 400 nucleotides in length, between 10 and 350 nucleotides in length, between 18 and 350 nucleotides in length, between 18 and 200 nucleotides in length, between 10 and 150 nucleotides in length, or between 11 and 100 nucleotides in length. In certain, embodiments, two of the targeted modifications are insertions between 10 and 350 nucleotides in length, between 18 and 350 nucleotides in length, between 18 and 200 nucleotides in length, between 10 and 150 nucleotides in length, or between 11 and 100 nucleotides in length.

[0020] In another variation of the methods described above, at least two insertions are made, and at least one of the insertions is an upregulatory sequence, optionally wherein the insertion is in an endogenous GmDR1 gene and/or other gene set forth in Table 10 and results in increased expression of the endogenous GmDR1 gene and/or other gene set forth in Table 10 relative to a reference plant lacking the modification. In yet another variation, the targeted modification methods described above insert or create at least one transcription factor binding site. In yet another variation of the methods described above, the insertion or insertions of predetermined sequences into the plant genome are accompanied by the deletion of sequences from the plant genome.

[0021] In yet another embodiment of the targeted modification methods described above, the methods further comprise obtaining a plant from the modified plant cell and breeding the plant. In yet another embodiment, the methods described above comprise a step of introducing additional genetic or epigenetic changes into the modified plant cell or into a plant grown from the modified plant cell.

[0022] In an embodiment of the targeted modification methods described above, at least two targeted insertions are made and the targeted insertions independently up- or down-regulate the expression of two or more distinct genes. For example, a targeted insertion can increase expression of an endogenous GmDR1 gene and/or other gene set forth in Table 10 at least 10%, 15%, 20%, 25%, 30%, 35%, 40%, 50%, 60%, 70%, 80%, 90%, 95%, 100% or greater, e.g., at least a 2-fold, 5-fold, 10-fold, 20-fold, 30-fold, 40-fold, 50-fold change, 100-fold or even 1000-fold change or more. In some embodiments, expression is increased between 10-100%; between 2-fold and 5-fold; between 2 and 10-fold; between 10-fold and 50-fold; between 10-fold and a 100-fold; between 100-fold and 1000-fold; between 1000-fold and 5,000-fold; between 5.000-fold and 10,000 fold, all in comparison to a reference or control plant lacking the targeted insertion or replacement. In some embodiments, a targeted insertion may decrease expression by at least 1%, 5%, 10%, 15%, 20%, 25%, 30%, 35%, 40%, 50%, 60%, 70%, 80%, 90%, 95%, 99% or more.

[0023] In yet another embodiment of the targeted insertion methods described above, the donor polynucleotide is tethered to a crRNA by a covalent bond, a non-covalent bond, or a combination of covalent and non-covalent bonds. In a related embodiment, the disclosure provides a composition for targeting a genome comprising a donor polynucleotide tethered to a cRNA by a covalent bond, a non-covalent bond, or a combination of covalent and non-covalent bonds.

[0024] In another embodiment of the targeted modification methods described above, the loss of epigenetic marks after modifying occurs in less than 0.1%, 0.08%, 0.05%, 0.02%, or 0.01% of the genome. In yet another embodiment of the targeted modification methods described above, the genome of the modified plant cell is more than 99%, e.g., more than 99.5% or more than 99.9% identical to the genome of the parent cell.

[0025] In yet another embodiment of the targeted modification methods described above, at least one of the targeted modifications is an insertion and at least one insertion is in a region of the genome that is recalcitrant to meiotic or mitotic recombination.

[0026] In certain embodiments of the plant cell genome targeting methods described above, the plant cell is a member of a pool of cells being targeted. In related embodiments, the modified cells within the pool are characterized by sequencing after targeting.

[0027] The disclosure also provides modified soybean plant cells comprising at least two separately targeted insertions in its genome, wherein the insertions are determined relative to a parent plant cell, and wherein the modified plant cell is devoid of mitotically or meiotically generated genetic or epigenetic changes relative to the parent plant cell. In certain embodiments, these plant cells are obtained using the multiplex targeted insertion methods described above. In certain embodiments, the modified plant cells comprise at least two separately targeted insertions, wherein the genome of the modified plant cell is at least 95%, at least 96%, at least 97%, at least 98%, at least 99%, at least 99.5%, at least 99.9%, or at least 99.99% identical to the parent cell, taking all genetic or epigenetic changes into account.

[0028] While the introgression of certain traits and transgenes into plants has been successful, achieving a homozygous modified plant in one step (i.e., modifying all targeted loci simultaneously) has not been previously described. Plants homozygous for, e.g., targeted insertions could only be obtained by further crossing and/or techniques involving double-haploids. These techniques are not only time consuming and laborious, they also lead to plants which deviate from the original plant not only for the targeted insertion but also for other changes as a consequence of the techniques employed to enable homozygosity. As such changes could have unintended and unpredictable consequences and may require further testing or screening, they are clearly undesired in a breeding process. In certain embodiments, the disclosure provides methods of making a targeted mutation and/or targeted insertion in all of the 2n targeted loci in a plant genome in one step. In embodiments, the two or more loci are alleles of a given sequence of interest; when all alleles of a given gene or sequence of interest are modified in the same way, the result is homozygous modification of the gene. For example, embodiments of the method enable targeted modification of both alleles of a gene in a diploid (2n ploidy, where n=1) plant, or targeted modification of all three alleles in a triploid (2n ploidy, where n=1.5) plant, or targeted modification of all six alleles of a gene in a hexaploid (2n ploidy, where n=3) plant.

[0029] The disclosure also provides modified plant cells resulting from any of the claimed methods described, as well as recombinant plants grown from those modified plant cells.

[0030] In some embodiments, the disclosure provides a method of manufacturing a processed plant product, comprising: (a) modifying a plant cell according to any of the targeted methods described above; (b) growing a modified plant from said plant cell, and (c) processing the modified plant into a processed product, thereby manufacturing a processed plant product. In related embodiments, the processed product may be meal, oil, juice, sugar, starch, fiber, an extract, wood or wood pulp, flour, cloth or some other commodity plant product. The disclosure also provides a method of manufacturing a plant product, comprising (a) modifying a plant cell according to any of the targeted methods described above, (b) growing an modified plant from said plant cell, and (c) harvesting a product of the modified plant, thereby manufacturing a plant product. In related embodiments, the plant product is a product may be leaves, fruit, vegetables, nuts, seeds, oil, wood, flowers, cones, branches, hay, fodder, silage, stover, straw, pollen, or some other harvested commodity product. In further related embodiments, the processed products and harvested products are packaged.

### DETAILED DESCRIPTION

### Definitions

[0031] Unless otherwise stated, nucleic acid sequences in the text of this specification are given, when read from left to right, in the 5′ to 3′ direction. Nucleic acid sequences may be provided as DNA or as RNA, as specified; disclosure of one necessarily defines the other, as well as necessarily defines the exact complements, as is known to one of ordinary skill in the art. Where a term is provided in the singular, the inventors also contemplate aspects of the disclosure described by the plural of that term.

[0032] The term “and/or” where used herein is to be taken as specific disclosure of each of the two specified features or components with or without the other. Thus, the term and/or” as used in a phrase such as “A and/or B” herein is intended to include “A and B,” “A or B,” “A” (alone), and “B” (alone). Likewise, the term “and/or” as used in a phrase such as “A, B, and/or C” is intended to encompass each of the following embodiments: A, B, and C; A, B, or C; A or C; A or B; B or C; A and C; A and B; B and C; A (alone); B (alone); and C (alone).

[0033] By “polynucleotide” is meant a nucleic acid molecule containing multiple nucleotides and refers to “oligonucleotides” (defined here as a polynucleotide molecule of between 2-25 nucleotides in length) and polynucleotides of 26 or more nucleotides. Polynucleotides are generally described as single- or double-stranded. Where a polynucleotide contains double-stranded regions formed by intra- or intermolecular hybridization, the length of each double-stranded region is conveniently described in terms of the number of base pairs. Aspects of this disclosure include the use of polynucleotides or compositions containing polynucleotides; embodiments include one or more oligonucleotides or polynucleotides or a mixture of both, including single- or double-stranded RNA or single- or double-stranded DNA or single- or double-stranded DNA/RNA hybrids or chemically modified analogues or a mixture thereof. In various embodiments, a polynucleotide (such as a single-stranded DNA/RNA hybrid or a double-stranded DNA/RNA hybrid) includes a combination of ribonucleotides and deoxyribonucleotides (e. g., synthetic polynucleotides consisting mainly of ribonucleotides but with one or more terminal deoxyribonucleotides or synthetic polynucleotides consisting mainly of deoxyribonucleotides but with one or more terminal dideoxyribonucleotides), or includes non-canonical nucleotides such as inosine, thiouridine, or pseudouridine. In embodiments, the polynucleotide includes chemically modified nucleotides (see, e. g., Verma and Eckstein (1998) Annu. Rev. Biochem., 67:99-134); for example, the naturally occurring phosphodiester backbone of an oligonucleotide or polynucleotide can be partially or completely modified with phosphorothioate, phosphorodithioate, or methylphosphonate internucleotide linkage modifications; modified nucleoside bases or modified sugars can be used in oligonucleotide or polynucleotide synthesis; and oligonucleotides or polynucleotides can be labelled with a fluorescent moiety (e. g., fluorescein or rhodamine or a fluorescence resonance energy transfer or FRET pair of chromophore labels) or other label (e. g., biotin or an isotope). Modified nucleic acids, particularly modified RNAs, are disclosed in U.S. Pat. No. 9,464,124, incorporated by reference in its entirety herein. For some polynucleotides (especially relatively short polynucleotides, e. g., oligonucleotides of 2-25 nucleotides or base-pairs, or polynucleotides of about 25 to about 300 nucleotides or base-pairs), use of modified nucleic acids, such as locked nucleic acids (“LNAs”), is useful to modify physical characteristics such as increased melting temperature (Tₘ) of a polynucleotide duplex incorporating DNA or RNA molecules that contain one or more LNAs; see, e. g., You et al. (2006) Nucleic Acids Res., 34:1-11 (e60), doi:10.1093/nar/gkl175.

[0034] In the context of the genome targeting methods described herein, the phrase “contacting a genome” with an agent means that an agent responsible for effecting the targeted genome modification (e.g., a break, a deletion, a rearrangement, or an insertion) is delivered to the interior of the cell so the directed mutagenic action can take place.

[0035] In the context of discussing or describing the ploidy of a plant cell, the “n” (as in “a ploidy of 2n”) refers to the number of homologous pairs of chromosomes, and is typically equal to the number of homologous pairs of gene loci on all chromosomes present in the cell.

[0036] The term “inbred variety” refers to a genetically homozygous or substantially homozygous population of plants that preferably comprises homozygous alleles at about 95%, preferably 98.5% or more of its loci. An inbred line can be developed through inbreeding (i.e., several cycles of selfing, more preferably at least 5, 6, 7 or more cycles of selfing) or doubled haploidy resulting in a plant line with a high uniformity. Inbred lines breed true, e.g., for one or more or all phenotypic traits of interest. An “inbred”, “inbred individual, or “inbred progeny” is an individual sampled from an inbred line.

[0037] “F1, F2, F3, etc.” refers to the consecutive related generations following a cross between two parent plants or parent lines. The plants grown from the seeds produced by crossing two plants or lines is called the F1 generation. Selfing the F1 plants results in the F2 generation, etc. “F1 hybrid” plant (or F1 hybrid seed) is the generation obtained from crossing two inbred parent lines. Thus, F1 hybrid seeds are seeds from which F1 hybrid plants grow. F1 hybrids are more vigorous and higher yielding, due to heterosis.

[0038] Hybrid seed: Hybrid seed is seed produced by crossing two different inbred lines (i.e, a female inbred line with a male inbred). Hybrid seed is heterozygous over a majority of its alleles.

[0039] As used herein, the term “variety” refers to a group of similar plants that by structural or genetic features and/or performance can be distinguished from other varieties within the same species.

[0040] The term “cultivar” (for cultivated variety) is used herein to denote a variety that is not normally found in nature but that has been created by humans, i.e., having a biological status other than a “wild” status, which “wild” status indicates the original non-cultivated, or natural state of a plant or accession. The term “cultivar” includes, but is not limited to, semi-natural, semi-wild, weedy, traditional cultivar, landrace, breeding material, research material, breeder's line, synthetic population, hybrid, founder stock/base population, inbred line (parent of hybrid cultivar), segregating population, mutant/genetic stock, and advanced/improved cultivar. The term “elite background” is used herein to indicate the genetic context or environment of a targeted mutation of insertion.

[0041] The term “dihaploid line” refers to stable inbred lines issued from another culture. Some pollen grains (haploid) cultivated on specific medium and circumstances can develop plantlets containing n chromosomes. These plantlets are then “double” and contain 2n chromosomes. The progeny of these plantlets are named “dihaploid” and are essentially not segregating any more (i.e., they are stable).

[0042] “F1 hybrid” plant (or F hybrid seed) is the generation obtained from crossing two inbred parent lines. Thus, F1 hybrid seeds are seeds from which F1 hybrid plants grow. F1 hybrids are more vigorous and higher yielding, due to heterosis. Inbred lines are essentially homozygous at most loci in the genome. A “plant line” or “breeding line” refers to a plant and its progeny. “F1”, “F2”, “F3”, etc.” refers to the consecutive related generations following a cross between two parent plants or parent lines. The plants grown from the seeds produced by crossing two plants or lines is called the F1 generation. Selfing the F1 plants results in the F2 generation, etc.

[0043] The term “allele(s)” means any of one or more alternative forms of a gene at a particular locus, all of which alleles relate to one trait or characteristic at a specific locus. In a diploid cell of an organism, alleles of a given gene are located at a specific location, or locus (loci plural), on a chromosome. One allele is present on each chromosome of the pair of homologous chromosomes. A diploid plant species may comprise a large number of different alleles at a particular locus. These may be identical alleles of the gene (homozygous) or two different alleles (heterozygous).

[0044] The phrase “allelic variant” as used herein refers to a polynucleotide or polypeptide sequence variant found in different alleles of a given gene. Polynucleotide sequence variants of such allelic variants can occur in coding and/or non-coding regions of the gene.

[0045] The term “locus” (loci plural) means a specific place or places or a site on a chromosome where for example a QTL, a gene or genetic marker is found.

[0046] The spontaneous (non-targeted) mutation rate for a single base pair is estimated to be 7×10⁻⁹ per bp per generation. Assuming an estimated 30 replications per generation, this leads to an estimated spontaneous (non-targeted) mutation rate of 2×10⁻¹⁰ mutations per base pair per replication event.

[0047] As used herein, the phrase “biological sample” refers to either intact or non-intact (e.g. milled seed or plant tissue, chopped plant tissue, lyophilized tissue) plant tissue. It may also be an extract comprising intact or non-intact seed or plant tissue. The biological sample can comprise flour, meal, syrup, oil, starch, and cereals manufactured in whole or in part to contain crop plant by-products. In certain embodiments, the biological sample is “non-regenerable” (i.e., incapable of being regenerated into a plant or plant part). In certain embodiments, the biological sample refers to a homogenate, an extract, or any fraction thereof containing genomic DNA of the organism from which the biological sample was obtained, wherein the biological sample does not comprising living cells.

[0048] As used herein, the terms “Cpf1” and “Cas12a” are used interchangeably to refer to the same RNA guided DNA endonuclease.

[0049] As used herein, the terms “Cas12j” and “CasΦ” are used interchangeably herein to refer to the same grouping of RNA directed nucleases. Such “Cas12j” and “CasΦ” include nucleases disclosed in Pausch et al. 2020 (DOI: 10.1126/science.abb1400).

[0050] As used herein, the phrase “GmDR1” gene encompasses the soybean gene set forth in SEQ ID NO: 762 and allelic variants thereof. Such allelic variants can have at least 85%, 90%, 95%, 96%, 97%, 98%, 99%, 99.5%, or 99.9% sequence identity to SEQ ID NO: 762. Allelic variants include variants of the GmDR1 gene found in domesticated Glycine max cultivars. The endogenous soybean GmDR1 gene and alleles thereof are located on soybean chromosome 10.

[0051] As used herein, the phrase “GmDR1 promoter and 5′UTR” encompasses the soybean promoter and 5′UTR set forth in SEQ ID NO: 764 and allelic variants thereof. Such allelic variants can have at least 85%, 90%, 95%, 96%, 97%, 98%, 99%, 99.5%, or 99.9% sequence identity to SEQ ID NO: 764. Allelic variants include variants of the GmDR1 gene found in domesticated Glycine max cultivars.

[0052] As used herein, the terms “correspond,” “corresponding,” and the like, when used in the context of an nucleotide position, mutation, and/or substitution in any given polynucleotide (e.g., an allelic variant of a GmDR1 gene of SEQ ID NO: 762 or a GmDR1 promoter and 5′ UTR of SEQ ID NO: 764) with respect to the reference polynucleotide sequence (e.g., SEQ ID NO: 762 or 764) all refer to the position of the polynucleotide residue in the given sequence that has identity to the residue in the reference nucleotide sequence when the given polynucleotide is aligned to the reference polynucleotide sequence using a pairwise alignment algorithm (e.g., CLUSTAL O 1.2.4 with default parameters).

[0053] The phrase “operably linked” refers to a juxtaposition wherein the components so described are in a relationship permitting them to function in their intended manner. For instance, a promoter is operably linked to a coding sequence if the promoter affects its transcription or expression.

[0054] As used herein, the term “plant” includes a whole plant and any descendant, cell, tissue, or part of a plant. The term “plant parts” include any part(s) of a plant, including, for example and without limitation: seed (including mature seed and immature seed); a plant cutting; a plant cell; a plant cell culture; or a plant organ (e.g., pollen, embryos, flowers, fruits, shoots, leaves, roots, stems, and explants). A plant tissue or plant organ may be a seed, protoplast, callus, or any other group of plant cells that is organized into a structural or functional unit. A plant cell or tissue culture may be capable of regenerating a plant having the physiological and morphological characteristics of the plant from which the cell or tissue was obtained, and of regenerating a plant having substantially the same genotype as the plant. Regenerable cells in a plant cell or tissue culture may be embryos, protoplasts, meristematic cells, callus, pollen, leaves, anthers, roots, root tips, silk, flowers, kernels, ears, cobs, husks, or stalks. In contrast, some plant cells are not capable of being regenerated to produce plants and are referred to herein as “non-regenerable” plant cells.

[0055] As used herein, terms “replace,” “replacement,” “replacing” and the like are used synonymously with the terms “substitute,” “substitution,” “substituting,” and the line with regards to changes in nucleotide residues in a polynucleotide molecule.

[0056] The term “isolated” as used herein means having been removed from its natural environment.

[0057] As used herein, the terms “include,” “includes,” and “including” are to be construed as at least having the features to which they refer while not excluding any additional unspecified features.

[0058] To the extent to which any of the preceding definitions is inconsistent with definitions provided in any patent or non-patent reference incorporated herein by reference, any patent or non-patent reference cited herein, or in any patent or non-patent reference found elsewhere, it is understood that the preceding definition will be used herein.

[0059] CRISPR technology for editing the genes of eukaryotes is disclosed in U. S. Patent Application Publications 2016/0138008A 1 and US2015/0344912A 1, and in U.S. Pat. Nos. 8,697,359, 8,771,945, 8,945,839, 8,999,641, 8,993,233, 8,895,308, 8,865,406, 8,889,418, 8,871,445, 8,889,356, 8,932,814, 8,795,965, and 8,906,616. Cpf1 endonuclease and corresponding guide RNAs and PAM sites are disclosed in U. S. Patent Application Publication 2016/0208243 A 1. Other CRISPR nucleases useful for editing genomes include C2c1 and C2c3 (see Shmakov et al. (2015) Mol. Cell, 60:385-397) and CasX and CasY (see Burstein et al. (2016) Nature, doi:10.1038/nature21059). Plant RNA promoters for expressing CRISPR guide RNA and plant codon-optimized CRISPR Cas9 endonuclease are disclosed in International Patent Application PCT/US2015/018104 (published as WO 2015/131101 and claiming priority to U.S. Provisional Patent Application 61/945,700). Methods of using CRISPR technology for genome editing in plants are disclosed in in U. S. Patent Application Publications US 2015/0082478A1 and US 2015/0059010A1 and in International Patent Application PCT/US2015/038767 A1 (published as WO 2016/007347 and claiming priority to U.S. Provisional Patent Application 62/023,246).

[0060] CRISPR (Clustered Regularly Interspaced Short Palindromic Repeats)/Cas (CRISPR-associated) systems, or CRISPR systems, are adaptive defense systems originally discovered in bacteria and archaea. CRISPR systems use RNA-guided nucleases termed CRISPR-associated or “Cas” endonucleases (e. g., Cas9 or Cpf1) to cleave foreign DNA. In a typical CRISPR/Cas system, a Cas endonuclease is directed to a target nucleotide sequence (e. g., a site in the genome that is to be sequence-edited) by sequence-specific, non-coding “guide RNAs” that target single- or double-stranded DNA sequences. In microbial hosts, CRISPR loci encode both Cas endonucleases and “CRISPR arrays” of the non-coding RNA elements that determine the specificity of the CRISPR-mediated nucleic acid cleavage.

[0061] Three classes (I-III) of CRISPR systems have been identified across a wide range of bacterial hosts. The well characterized class II CRISPR systems use a single Cas endonuclease (rather than multiple Cas proteins). One class II CRISPR system includes a type II Cas endonuclease such as Cas9, a CRISPR RNA (“crRNA”), and a trans-activating crRNA (“tracrRNA”). The crRNA contains a “guide RNA”, typically a 20-nucleotide RNA sequence that corresponds to (i. e., is identical or nearly identical to, or alternatively is complementary or nearly complementary to) a 20-nucleotide target DNA sequence. The crRNA also contains a region that binds to the tracrRNA to form a partially double-stranded structure which is cleaved by RNase III, resulting in a crRNA/tracrRNA hybrid. The crRNA/tracrRNA hybrid then directs the Cas9 endonuclease to recognize and cleave the target DNA sequence.

[0062] The target DNA sequence must generally be adjacent to a “protospacer adjacent motif” (“PAM”) that is specific for a given Cas endonuclease; however, PAM sequences are short and relatively non-specific, appearing throughout a given genome. CRISPR endonucleases identified from various prokaryotic species have unique PAM sequence requirements, examples of PAM sequences include 5′-NGG (Streptococcus pyogenes), 5′-NNAGAA (Streptococcus thermophilus CRISPR1), 5′-NGGNG (Streptococcus thermophilus CRISPR3), 5′-NNGRRT or 5′-NNGRR (Staphylococcus aureus Cas9, SaCas9), and 5′-NNNGATT (Neisseria meningitidis). Some endonucleases, e. g., Cas9 endonucleases, are associated with G-rich PAM sites, e. g., 5′-NGG, and perform blunt-end cleaving of the target DNA at a location 3 nucleotides upstream from (5′ from) the PAM site.

[0063] Another class II CRISPR system includes the type V endonuclease Cpf1, which is a smaller endonuclease than is Cas9; examples include AsCpf1 (from Acidaminococcus sp.) and LbCpf1 (from Lachnospiraceae sp.). Cpf1-associated CRISPR arrays are processed into mature crRNAs without the requirement of a tracrRNA; in other words, a Cpf1 system requires only the Cpf1 nuclease and a crRNA to cleave the target DNA sequence. Cpf1 endonucleases, are associated with T-rich PAM sites, e. g., 5′-TTN. Cpf1 can also recognize a 5′-CTA PAM motif. Cpf1 cleaves the target DNA by introducing an offset or staggered double-strand break with a 4- or 5-nucleotide 5′ overhang, for example, cleaving a target DNA with a 5-nucleotide offset or staggered cut located 18 nucleotides downstream from (3′ from) from the PAM site on the coding strand and 23 nucleotides downstream from the PAM site on the complimentary strand; the 5-nucleotide overhang that results from such offset cleavage allows more precise genome editing by DNA insertion by homologous recombination than by insertion at blunt-end cleaved DNA. See, e. g., Zetsche et al. (2015) Cell, 163:759-771. Other CRISPR nucleases useful in methods and compositions of the disclosure include C2c1 and C2c3 (see Shmakov et al. (2015) Mol. Cell, 60:385-397). Like other CRISPR nucleases, C2c1 from Alicyclobacillus acidoterrestris (AacC2c1; amino acid sequence with accession ID T0D7A2, deposited on-line at www[dot]ncbi[dot]nlm[dot]nih[dot]gov/protein/1076761101) requires a guide RNA and PAM recognition site: C2c1 cleavage results in a staggered seven-nucleotide DSB in the target DNA (see Yang et al. (2016) Cell, 167:1814-1828.e12) and is reported to have high mismatch sensitivity, thus reducing off-target effects (see Liu et al. (2016) Mol. Cell, available on line at dx[dot]doi[dot]org/10[dot]1016/j[dot]molcel[dot]2016[dot]11.040). Yet other CRISPR nucleases include nucleases identified from the genomes of uncultivated microbes, such as CasX and CasY (e. g., a CRISPR-associated protein CasY from an uncultured Parcubacteria group bacterium, amino acid sequence with accession ID APG80656, deposited on-line at www[dot]ncbi[dot]nlm[dot]nih[dot]gov/protein/APG80656.1]); see Burstein et al. (2016) Nature, doi:10.1038/nature21059.

[0064] For the purposes of gene editing, CRISPR arrays can be designed to contain one or multiple guide RNA sequences corresponding to a desired target DNA sequence; see, for example, Cong et al. (2013) Science, 339:819-823; Ran et al. (2013) Nature Protocols, 8:2281-2308. At least 16 or 17 nucleotides of gRNA sequence are required by Cas9 for DNA cleavage to occur; for Cpf1 at least 16 nucleotides of gRNA sequence are needed to achieve detectable DNA cleavage and at least 18 nucleotides of gRNA sequence were reported necessary for efficient DNA cleavage in vitro; see Zetsche et al. (2015) Cell, 163:759-771. In practice, guide RNA sequences are generally designed to have a length of between 17-24 nucleotides (frequently 19, 20, or 21 nucleotides) and exact complementarity (i. e., perfect base-pairing) to the targeted gene or nucleic acid sequence; guide RNAs having less than 100% complementarity to the target sequence can be used (e. g., a gRNA with a length of 20 nucleotides and between 1-4 mismatches to the target sequence) but can increase the potential for off-target effects. The design of effective guide RNAs for use in plant genome editing is disclosed in U. S. Patent Application Publication 2015/0082478 A1, the entire specification of which is incorporated herein by reference. More recently, efficient gene editing has been achieved using a chimeric “single guide RNA” (“sgRNA”), an engineered (synthetic) single RNA molecule that mimics a naturally occurring crRNA-tracrRNA complex and contains both a tracrRNA (for binding the nuclease) and at least one crRNA (to guide the nuclease to the sequence targeted for editing); see, for example, Cong et al. (2013) Science, 339:819-823; Xing et al. (2014) BMC Plant Biol., 14:327-340. Chemically modified sgRNAs have been demonstrated to be effective in genome editing; see, for example, Hendel et al. (2015) Nature Biotech., 985-991.

[0065] CRISPR-type genome editing has value in various aspects of agriculture research and development. CRISPR elements, i.e., CRISPR endonucleases and CRISPR single-guide RNAs, are useful in effecting genome editing without remnants of the CRISPR elements or selective genetic markers occurring in progeny. Alternatively, genome-inserted CRISPR elements are useful in plant lines adapted for multiplex genetic screening and breeding. For instance, a plant species can be created to express one or more of a CRISPR endonuclease such as a Cas9- or a Cpf1-type endonuclease or combinations with unique PAM recognition sites. Cpf1 endonuclease and corresponding guide RNAs and PAM sites are disclosed in U. S. Patent Application Publication 2016/0208243 A1, which is incorporated herein by reference for its disclosure of DNA encoding Cpf1 endonucleases and guide RNAs and PAM sites. Introduction of one or more of a wide variety of CRISPR guide RNAs that interact with CRISPR endonucleases integrated into a plant genome or otherwise provided to a plant is useful for genetic editing for providing desired phenotypes or traits, for trait screening, or for trait introgression. Multiple endonucleases can be provided in expression cassettes with the appropriate promoters to allow multiple genome editing in a spatially or temporally separated fashion in either in chromosome DNA or episome DNA.

[0066] Whereas wild-type Cas9 generates double-strand breaks (DSBs) at specific DNA sequences targeted by a gRNA, a number of CRISPR endonucleases having modified functionalities are available, for example: (1) a “nickase” version of Cas9 generates only a single-strand break; (2) a catalytically inactive Cas9 (“dCas9”) does not cut the target DNA but interferes with transcription; (3) dCas9 on its own or fused to a repressor peptide can repress gene expression; (4) dCas9 fused to an activator peptide can activate or increase gene expression; (5) dCas9 fused to FokI nuclease (“dCas9-FokI”) can be used to generate DSBs at target sequences homologous to two gRNAs; and (6) dCas9 fused to histone-modifying enzymes (e. g., histone acetyltransferases, histone methyltransferases, histone deacetylases, and histone demethylases) can be used to alter the epigenome in a site-specific manner, for example, by changing the methylation or acetylation status at a particular locus. See, e. g., the numerous CRISPR/Cas9 plasmids disclosed in and publicly available from the Addgene repository (Addgene, 75 Sidney St., Suite 550A, Cambridge, MA 02139; addgene[dot]org/crispr/). A “double nickase” Cas9 that introduces two separate double-strand breaks, each directed by a separate guide RNA, is described as achieving more accurate genome editing by Ran et al. (2013) Cell, 154:1380-1389.

[0067] In some embodiments, the methods of targeted modification described herein provide a means for avoiding unwanted epigenetic losses that can arise from tissue culturing modified plant cells (see, e.g., Stroud et al. eLife 2013; 2:e00354). Using the methods described herein in the absence of tissue culture, a loss of epigenetic marking may occur in less than 0.01% of the genome. This contrasts with results obtained with plants where tissue culture methods may result in losses of DNA methylation that occur, on average, as determined by bisulfite sequencing, at 1344 places that are on average 334 base pairs long, which means a loss of DNA methylation at an average of 0.1% of the genome (Stroud, 2013). In other words, the loss in marks using the targeted modification techniques described herein without tissue culture is 10 times lower than the loss observed when tissue culture techniques are relied on. In certain embodiments of the novel modified plant cells described herein, the modified plant cell or plant does not have significant losses of methylation compared to a non-modified parent plant cell or plant; in other words, the methylation pattern of the genome of the modified plant cell or plant is not greatly different from the methylation pattern of the genome of the parent plant cell or plant; in embodiments, the difference between the methylation pattern of the genome of the modified plant cell or plant and that of the parent plant cell or plant is less than 0.1%, 0.05%, 0.02%, or 0.01% of the genome, or less than 0.005% of the genome, or less than 0.001% of the genome (see, e. g., Stroud et al. (2013) eLife 2:e00354; doi:10.7554/eLife.00354).

[0068] CRISPR technology for editing the genes of eukaryotes is disclosed in U.S. Patent Application Publications 2016/0138008A1 and US2015/0344912A1, and in U.S. Pat. Nos. 8,697,359, 8,771,945, 8,945,839, 8,999,641, 8.993.233, 8,895,308, 8,865,406, 8,889,418, 8,871,445, 8,889,356, 8,932,814, 8,795,965, and 8,906,616. Cpf1 endonuclease and corresponding guide RNAs and PAM sites are disclosed in U.S. Patent Application Publication 2016/0208243 A1. Plant RNA promoters for expressing CRISPR guide RNA and plant codon-optimized CRISPR Cas9 endonuclease are disclosed in International Patent Application PCT/US2015/018104 (published as WO 2015/131101 and claiming priority to U.S. Provisional Patent Application 61/945,700). Methods of using CRISPR technology for genome editing in plants are disclosed in in U.S. Patent Application Publications US 2015/0082478A 1 and US 2015/0059010A 1 and in International Patent Application PCT/US2015/038767 A1 (published as WO 2016/007347 and claiming priority to U.S. Provisional Patent Application 62/023,246). All of the patent publications referenced in this paragraph are incorporated herein by reference in their entirety.

[0069] In some embodiments, one or more vectors driving expression of one or more polynucleotides encoding elements of a genome-editing system (e. g., encoding a guide RNA or a nuclease) are introduced into a plant cell or a plant protoplast, whereby these elements, when expressed, result in alteration of a target nucleotide sequence. In embodiments, a vector comprises a regulatory element such as a promoter operably linked to one or more polynucleotides encoding elements of a genome-editing system. In such embodiments, expression of these polynucleotides can be controlled by selection of the appropriate promoter, particularly promoters functional in a plant cell; useful promoters include constitutive, conditional, inducible, and temporally or spatially specific promoters (e. g., a tissue specific promoter, a developmentally regulated promoter, or a cell cycle regulated promoter). In embodiments, the promoter is operably linked to nucleotide sequences encoding multiple guide RNAs, wherein the sequences encoding guide RNAs are separated by a cleavage site such as a nucleotide sequence encoding a microRNA recognition/cleavage site or a self-cleaving ribozyme (see, e. g., Ferré-D'Amaré and Scott (2014) Cold Spring Harbor Perspectives Biol., 2:a003574). In embodiments, the promoter is a pol II promoter operably linked to a nucleotide sequence encoding one or more guide RNAs. In embodiments, the promoter operably linked to one or more polynucleotides encoding elements of a genome-editing system is a constitutive promoter that drives DNA expression in plant cells; in embodiments, the promoter drives DNA expression in the nucleus or in an organelle such as a chloroplast or mitochondrion. Examples of constitutive promoters include a CaMV 35S promoter as disclosed in U.S. Pat. Nos. 5,858,742 and 5,322,938, a rice actin promoter as disclosed in U.S. Pat. No. 5,641,876, a maize chloroplast aldolase promoter as disclosed in U.S. Pat. No. 7,151,204, and an opaline synthase (NOS) and octopine synthase (OCS) promoter from Agrobacterium tumefaciens. In embodiments, the promoter operably linked to one or more polynucleotides encoding elements of a genome-editing system is a promoter from figwort mosaic virus (FMV), a RUBISCO promoter, or a pyruvate phosphate dikinase (PDK) promoter, which is active in the chloroplasts of mesophyll cells. Other contemplated promoters include cell-specific or tissue-specific or developmentally regulated promoters, for example, a promoter that limits the expression of the nucleic acid targeting system to germline or reproductive cells (e. g., promoters of genes encoding DNA ligases, recombinases, replicases, or other genes specifically expressed in germline or reproductive cells); in such embodiments, the nuclease-mediated genetic modification (e. g., chromosomal or episomal double-stranded DNA cleavage) is limited only those cells from which DNA is inherited in subsequent generations, which is advantageous where it is desirable that expression of the genome-editing system be limited in order to avoid genotoxicity or other unwanted effects. All of the patent publications referenced in this paragraph are incorporated herein by reference in their entirety.

[0070] In some embodiments, elements of a genome-editing system (e.g., an RNA-guided nuclease and a guide RNA) are operably linked to separate regulatory elements on separate vectors. In other embodiments, two or more elements of a genome-editing system expressed from the same or different regulatory elements or promoters are combined in a single vector, optionally with one or more additional vectors providing any additional necessary elements of a genome-editing system not included in the first vector. For example, multiple guide RNAs can be expressed from one vector, with the appropriate RNA-guided nuclease expressed from a second vector. In another example, one or more vectors for the expression of one or more guide RNAs (e. g., crRNAs or sgRNAs) are delivered to a cell (e. g., a plant cell or a plant protoplast) that expresses the appropriate RNA-guided nuclease, or to a cell that otherwise contains the nuclease, such as by way of prior administration thereto of a vector for in vivo expression of the nuclease.

[0071] Genome-editing system elements that are combined in a single vector may be arranged in any suitable orientation, such as one element located 5′ with respect to (“upstream” of) or 3′ with respect to (“downstream” of) a second element. The coding sequence of one element may be located on the same or opposite strand of the coding sequence of a second element, and oriented in the same or opposite direction. In embodiments, the endonuclease and the nucleic acid-targeting guide RNA may be operably linked to and expressed from the same promoter. In embodiments, a single promoter drives expression of a transcript encoding an endonuclease and the guide RNA, embedded within one or more intron sequences (e. g., each in a different intron, two or more in at least one intron, or all in a single intron), which can be plant-derived; such use of introns is especially contemplated when the expression vector is being transformed or transfected into a monocot plant cell or a monocot plant protoplast.

[0072] Expression vectors provided herein may contain a DNA segment near the 3′ end of an expression cassette that acts as a signal to terminate transcription and directs polyadenylation of the resultant mRNA. Such a 3′ element is commonly referred to as a “3′-untranslated region” or “3-UTR” or a “polyadenylation signal”. Useful 3′ elements include: Agrobacterium tumefaciens nos 3′, tml 3′, tmr 3′, tins 3′, ocs 3′, and tr7 3′ elements disclosed in U.S. Pat. No. 6,090,627, incorporated herein by reference, and 3′ elements from plant genes such as the heat shock protein 17, ubiquitin, and fructose-1,6-bisphosphatase genes from wheat (Triticum aestivum), and the glutelin, lactate dehydrogenase, and beta-tubulin genes from rice (Oryza sativa), disclosed in U. S. Patent Application Publication 2002/0192813 A1, incorporated herein by reference.

[0073] In certain embodiments, a vector or an expression cassette includes additional components, e. g., a polynucleotide encoding a drug resistance or herbicide gene or a polynucleotide encoding a detectable marker such as green fluorescent protein (GFP) or beta-glucuronidase (gus) to allow convenient screening or selection of cells expressing the vector. In embodiments, the vector or expression cassette includes additional elements for improving delivery to a plant cell or plant protoplast or for directing or modifying expression of one or more genome-editing system elements, for example, fusing a sequence encoding a cell-penetrating peptide, localization signal, transit, or targeting peptide to the RNA-guided nuclease, or adding a nucleotide sequence to stabilize a guide RNA; such fusion proteins (and the polypeptides encoding such fusion proteins) or combination polypeptides, as well as expression cassettes and vectors for their expression in a cell, are specifically claimed. In embodiments, an RNA-guided nuclease (e. g., Cas9, Cpf1, CasY, CasX, C2c1, or C2c3) is fused to a localization signal, transit, or targeting peptide, e. g., a nuclear localization signal (NLS), a chloroplast transit peptide (CTP), or a mitochondrial targeting peptide (MTP); in a vector or an expression cassette, the nucleotide sequence encoding any of these can be located either 5′ and/or 3′ to the DNA encoding the nuclease. For example, a plant-codon-optimized Cas9 (pco-Cas9) from Streptococcus pyogenes and S. thermophilus containing nuclear localization signals and codon-optimized for expression in maize is disclosed in PCT/US2015/018104 (published as WO/2015/131101 and claiming priority to U.S. Provisional Patent Application 61/945,700), incorporated herein by reference. In another example, a chloroplast-targeting RNA is appended to the 5′ end of an mRNA encoding an endonuclease to drive the accumulation of the mRNA in chloroplasts; see Gomez, et al. (2010) Plant Signal Behav., 5: 1517-1519. In an embodiment, a Cas9 from Streptococcus pyogenes is fused to a nuclear localization signal (NLS), such as the NLS from SV40. In an embodiment, a Cas9 from Streptococcus pyogenes is fused to a cell-penetrating peptide (CPP), such as octa-arginine or nona-arginine or a homoarginine 12-mer oligopeptide, or a CPP disclosed in the database of cell-penetrating peptides CPPsite 2.0, publicly available at crdd[dot]osdd[dot]net/raghava/cppsite/. In an example, a Cas9 from Streptococcus pyogenes (which normally carries a net positive charge) is modified at the N-terminus with a negatively charged glutamate peptide “tag” and at the C-terminus with a nuclear localization signal (NLS); when mixed with cationic arginine gold nanoparticles (ArgNPs), self-assembled nanoassemblies were formed which were shown to provide good editing efficiency in human cells; see Mout et al. (2017) ACS Nano, doi:10.1021/acsnano.6b07600. In an embodiment, a Cas9 from Streptococcus pyogenes is fused to a chloroplast transit peptide (CTP) sequence. In embodiments, a CTP sequence is obtained from any nuclear gene that encodes a protein that targets a chloroplast, and the isolated or synthesized CTP DNA is appended to the 5′ end of the DNA that encodes a nuclease targeted for use in a chloroplast. Chloroplast transit peptides and their use are described in U.S. Pat. Nos. 5,188,642, 5,728,925, and 8,420,888, all of which are incorporated herein by reference in their entirety. Specifically, the CTP nucleotide sequences provided with the sequence identifier (SEQ ID) numbers 12-15 and 17-22 of U.S. Pat. No. 8,420,888 are incorporated herein by reference. In an embodiment, a Cas9 from Streptococcus pyogenes is fused to a mitochondrial targeting peptide (MTP), such as a plant MTP sequence; see, e. g., Jores et al. (2016) Nature Communications, 7:12036-12051.

[0074] Plasmids designed for use in plants and encoding CRISPR genome editing elements (CRISPR nucleases and guide RNAs) are publicly available from plasmid repositories such as Addgene (Cambridge, Massachusetts; also see “addgene[dot]com”) or can be designed using publicly disclosed sequences, e. g., sequences of CRISPR nucleases. In embodiments, such plasmids are used to co-express both CRISPR nuclease mRNA and guide RNA(s); in other embodiments, CRISPR endonuclease mRNA and guide RNA are encoded on separate plasmids. In embodiments, the plasmids are Agrobacterium TI plasmids. Materials and methods for preparing expression cassettes and vectors for CRISPR endonuclease and guide RNA for stably integrated and/or transient plant transformation are disclosed in PCT/US2015/018104 (published as WO/2015/131101 and claiming priority to U.S. Provisional Patent Application 61/945,700), U. S. Patent Application Publication 2015/0082478 A1, and PCT/US2015/038767 (published as WO/2016/007347 and claiming priority to U.S. Provisional Patent Application 62/023,246), all of which are incorporated herein by reference in their entirety. In embodiments, such expression cassettes are isolated linear fragments, or are part of a larger construct that includes bacterial replication elements and selectable markers; such embodiments are useful, e. g., for particle bombardment or nanoparticle delivery or protoplast transformation. In embodiments, the expression cassette is adjacent to or located between T-DNA borders or contained within a binary vector, e. g., for Agrobacterium-mediated transformation. In embodiments, a plasmid encoding a CRISPR nuclease is delivered to cell (such as a plant cell or a plant protoplast) for stable integration of the CRISPR nuclease into the genome of cell, or alternatively for transient expression of the CRISPR nuclease. In embodiments, plasmids encoding a CRISPR nuclease are delivered to a plant cell or a plant protoplast to achieve stable or transient expression of the CRISPR nuclease, and one or multiple guide RNAs (such as a library of individual guide RNAs or multiple pooled guide RNAs) or plasmids encoding the guide RNAs are delivered to the plant cell or plant protoplast individually or in combinations, thus providing libraries or arrays of plant cells or plant protoplasts (or of plant callus or whole plants derived therefrom), in which a variety of genome edits are provided by the different guide RNAs. A pool or arrayed collection of diverse modified plant cells comprising subsets of targeted modifications (e.g., a collection of plant cells or plants where some plants are homozygous and some are heterozygous for one, two, three or more targeted modifications) can be compared to determine the function of modified sequences (e.g., mutated or deleted sequences or genes) or the function of sequences being inserted. In other words, the methods and tools described herein can be used to perform “reverse genetics.”

[0075] In certain embodiments where the genome-editing system is a CRISPR system, expression of the guide RNA is driven by a plant U6 spliceosomal RNA promoter, which can be native to the genome of the plant cell or from a different species, e. g., a U6 promoter from maize, tomato, or soybean such as those disclosed in PCT/US2015/018104 (published as WO 2015/131101 and claiming priority to U.S. Provisional Patent Application 61/945,700), incorporated herein by reference, or a homologue thereof; such a promoter is operably linked to DNA encoding the guide RNA for directing an endonuclease, followed by a suitable 3′ element such as a U6 poly-T terminator. In another embodiment, an expression cassette for expressing guide RNAs in plants is used, wherein the promoter is a plant U3, 7SL (signal recognition particle RNA), U2, or U5 promoter, or chimerics thereof, e. g., as described in PCT/US2015/018104 (published as WO 2015/131101 and claiming priority to U.S. Provisional Patent Application 61/945,700), incorporated herein by reference. When multiple or different guide RNA sequences are used, a single expression construct may be used to correspondingly direct the genome editing activity to the multiple or different target sequences in a cell, such a plant cell or a plant protoplast. In various embodiments, a single vector includes 1, 2, 3, 4, 5, 6, 7, 8, 9, 10, about 15, about 20, or more guide RNA sequences; in other embodiments, 1, 2, 3, 4, 5, 6, 7, 8, 9, 10, about 15, about 20, or more guide RNA sequences are provided on multiple vectors, which can be delivered to one or multiple plant cells or plant protoplasts (e. g., delivered to an array of plant cells or plant protoplasts, or to a pooled population of plant cells or plant protoplasts).

[0076] In embodiments, one or more guide RNAs and the corresponding RNA-guided nuclease are delivered together or simultaneously. In other embodiments, one or more guide RNAs and the corresponding RNA-guided nuclease are delivered separately; these can be delivered in separate, discrete steps and using the same or different delivery techniques. In an example, an RNA-guided nuclease is delivered to a cell (such as a plant cell or plant protoplast) by particle bombardment, on carbon nanotubes, or by Agrobacterium-mediated transformation, and one or more guide RNAs is delivered to the cell in a separate step using the same or different delivery technique. In embodiments, an RNA-guided nuclease encoded by a DNA molecule or an mRNA is delivered to a cell with enough time prior to delivery of the guide RNA to permit expression of the nuclease in the cell; for example, an RNA-guided nuclease encoded by a DNA molecule or an mRNA is delivered to a plant cell or plant protoplast between 1-12 hours (e. g., about 1, 2, 3, 4, 5, 6, 7, 8, 9, 10, 11, or 12 hours, or between about 1-6 hours or between about 2-6 hours) prior to the delivery of the guide RNA to the plant cell or plant protoplast. In embodiments, whether the RNA-guided nuclease is delivered simultaneously with or separately from an initial dose of guide RNA, succeeding “booster” doses of guide RNA are delivered subsequent to the delivery of the initial dose; for example, a second “booster” dose of guide RNA is delivered to a plant cell or plant protoplast between 1-12 hours (e. g., about 1, 2, 3, 4, 5, 6, 7, 8, 9, 10, 11, or 12 hours, or between about 1-6 hours or between about 2-6 hours) subsequent to the delivery of the initial dose of guide RNA to the plant cell or plant protoplast. Similarly, in some embodiments, multiple deliveries of an RNA-guided nuclease or of a DNA molecule or an mRNA encoding an RNA-guided nuclease are used to increase efficiency of the genome modification.

[0077] In embodiments, the desired genome modification involves non-homologous recombination, in this case non-homologous end-joining of genomic sequence across one or more introduced double-strand breaks; generally, such embodiments do not require a donor template having homology “arms” (regions of homologous or complimentary sequence to genomic sequence flanking the site of the DSB). In various embodiments described herein, donor polynucleotides encoding sequences for targeted insertion at double-stranded breaks are single-stranded polynucleotides comprising RNA or DNA or both types of nucleotides; or the donor polynucleotides are at least partially double-stranded and comprise RNA, DNA or both types of nucleotides. Other modified nucleotides may also be used.

[0078] In other embodiments, the desired genome modification involves homologous recombination, wherein one or more double-stranded DNA break in the target nucleotide sequence is generated by the RNA-guided nuclease and guide RNA(s), followed by repair of the break(s) using a homologous recombination mechanism (“homology-directed repair”). In such embodiments, a donor template that encodes the desired nucleotide sequence to be inserted or knocked-in at the double-stranded break and generally having homology “arms” (regions of homologous or complimentary sequence to genomic sequence flanking the site of the DSB) is provided to the cell (such as a plant cell or plant protoplast); examples of suitable templates include single-stranded DNA templates and double-stranded DNA templates (e. g., in the form of a plasmid). In general, a donor template encoding a nucleotide change over a region of less than about 50 nucleotides is conveniently provided in the form of single-stranded DNA; larger donor templates (e. g., more than 100 nucleotides) are often conveniently provided as double-stranded DNA plasmids.

[0079] In certain embodiments directed to the targeted incorporation of sequences by homologous recombination, a donor template has a core nucleotide sequence that differs from the target nucleotide sequence (e. g., a homologous endogenous genomic region) by at least 1, at least 5, at least 10, at least 20, at least 30, at least 40, at least 50, or more nucleotides. This core sequence is flanked by “homology arms” or regions of high sequence identity with the targeted nucleotide sequence (e.g., to a GmDR1 gene of SEQ ID NO: 762, GmDR1 promoter or 5′UTR thereof of SEQ ID NO: 764, or an allelic variant thereof: in embodiments, the regions of high identity include at least 10, at least 50, at least 100, at least 150, at least 200, at least 300, at least 400, at least 500, at least 600, at least 750, or at least 1000 nucleotides on each side of the core sequence. In embodiments where the donor template is in the form of a single-stranded DNA, the core sequence is flanked by homology arms including at least 10, at least 20, at least 30, at least 40, at least 50, at least 60, at least 70, at least 80, or at least 100 nucleotides on each side of the core sequence. In embodiments where the donor template is in the form of a double-stranded DNA plasmid, the core sequence is flanked by homology arms including at least 500, at least 600, at least 700, at least 800, at least 900, or at least 1000 nucleotides on each side of the core sequence. In an embodiment, two separate double-strand breaks are introduced into the cell's target nucleotide sequence with a “double nickase” Cas9 (see Ran et al. (2013) Cell, 154:1380-1389), followed by delivery of the donor template.

[0080] Aspects of the disclosure involve various treatments employed to deliver to a plant cell or protoplast a guide RNA (gRNA), such as a crRNA or sgRNA (or a polynucleotide encoding such), and/or a polynucleotide encoding a sequence for targeted insertion at a double-strand break in a genome. In embodiments, one or more treatments are employed to deliver the gRNA into a plant cell or plant protoplast, e. g., through barriers such as a cell wall or a plasma membrane or nuclear envelope or other lipid bilayer.

[0081] Unless otherwise stated, the various compositions and methods described herein for delivering guide RNAs and nucleases to a plant cell or protoplast are also generally useful for delivering donor polynucleotides to the cell. The delivery of donor polynucleotides can be simultaneous with, or separate from (generally after) delivery of the nuclease and guide RNA to the cell. For example, a donor polynucleotide can be transiently introduced into a plant cell or plant protoplast, optionally with the nuclease and/or gRNA; in certain embodiments, the donor template is provided to the plant cell or plant protoplast in a quantity that is sufficient to achieve the desired insertion of the donor polynucleotide sequence but donor polynucleotides do not persist in the plant cell or plant protoplast after a given period of time (e. g., after one or more cell division cycles).

[0082] In certain embodiments, a gRNA- or donor polynucleotide, in addition to other agents involved in targeted modifications, can be delivered to a plant cell or protoplast by directly contacting the plant cell or protoplast with a composition comprising the gRNA(s) or donor polynucleotide(s). For example, a gRNA-containing composition in the form of a liquid, a solution, a suspension, an emulsion, a reverse emulsion, a colloid, a dispersion, a gel, liposomes, micelles, an injectable material, an aerosol, a solid, a powder, a particulate, a nanoparticle, or a combination thereof can be applied directly to a plant cell (or plant part or tissue containing the plant cell) or plant protoplast (e. g., through abrasion or puncture or otherwise disruption of the cell wall or cell membrane, by spraying or dipping or soaking or otherwise directly contacting, or by microinjection). In certain embodiments, a plant cell (or plant part or tissue containing the plant cell) or plant protoplast is soaked in a liquid gRNA-containing composition, whereby the gRNA is delivered to the plant cell or plant protoplast. In embodiments, the gRNA-containing composition is delivered using negative or positive pressure, for example, using vacuum infiltration or application of hydrodynamic or fluid pressure. In embodiments, the gRNA-containing composition is introduced into a plant cell or plant protoplast, e. g., by microinjection or by disruption or deformation of the cell wall or cell membrane, for example by physical treatments such as by application of negative or positive pressure, shear forces, or treatment with a chemical or physical delivery agent such as surfactants, liposomes, or nanoparticles; see, e. g., delivery of materials to cells employing microfluidic flow through a cell-deforming constriction as described in US Published Patent Application 2014/0287509, incorporated by reference in its entirety herein. Other techniques useful for delivering the gRNA-containing composition to a plant cell or plant protoplast include: ultrasound or sonication; vibration, friction, shear stress, vortexing, cavitation; centrifugation or application of mechanical force; mechanical cell wall or cell membrane deformation or breakage; enzymatic cell wall or cell membrane breakage or permeabilization; abrasion or mechanical scarification (e. g., abrasion with carborundum or other particulate abrasive or scarification with a file or sandpaper) or chemical scarification (e. g., treatment with an acid or caustic agent); and electroporation. In embodiments, the gRNA-containing composition is provided by bacterially mediated (e. g., Agrobacterium sp., Rhizobium sp., Sinorhizobium sp., Mesorhizobium sp., Bradyrhizobium sp., Azobacter sp., Phyllobacterium sp.) transfection of the plant cell or plant protoplast with a polynucleotide encoding the gRNA; see, e. g., Broothaerts et al. (2005) Nature, 433:629-633. Any of these techniques or a combination thereof are alternatively employed on the plant part or tissue or intact plant (or seed) from which a plant cell or plant protoplast is optionally subsequently obtained or isolated; in embodiments, the gRNA-containing composition is delivered in a separate step after the plant cell or plant protoplast has been obtained or isolated.

[0083] In embodiments, a treatment employed in delivery of a gRNA to a plant cell or plant protoplast is carried out under a specific thermal regime, which can involve one or more appropriate temperatures, e. g., chilling or cold stress (exposure to temperatures below that at which normal plant growth occurs), or heating or heat stress (exposure to temperatures above that at which normal plant growth occurs), or treating at a combination of different temperatures. In embodiments, a specific thermal regime is carried out on the plant cell or plant protoplast, or on a plant or plant part from which a plant cell or plant protoplast is subsequently obtained or isolated, in one or more steps separate from the gRNA delivery.

[0084] In embodiments, a whole plant or plant part or seed, or an isolated plant cell or plant protoplast, or the plant or plant part from which a plant cell or plant protoplast is obtained or isolated, is treated with one or more delivery agents which can include at least one chemical, enzymatic, or physical agent, or a combination thereof. In embodiments, a gRNA-containing composition further includes one or more one chemical, enzymatic, or physical agent for delivery. In embodiments that further include the step of providing an RNA-guided nuclease or a polynucleotide that encodes the RNA-guided nuclease, a gRNA-containing composition including the RNA-guided nuclease or polynucleotide that encodes the RNA-guided nuclease further includes one or more one chemical, enzymatic, or physical agent for delivery. Treatment with the chemical, enzymatic or physical agent can be carried out simultaneously with the gRNA delivery, with the RNA-guided nuclease delivery, or in one or more separate steps that precede or follow the gRNA delivery or the RNA-guided nuclease delivery. In embodiments, a chemical, enzymatic, or physical agent, or a combination of these, is associated or complexed with the polynucleotide composition, with the gRNA or polynucleotide that encodes or is processed to the gRNA, or with the RNA-guided nuclease or polynucleotide that encodes the RNA-guided nuclease; examples of such associations or complexes include those involving non-covalent interactions (e. g., ionic or electrostatic interactions, hydrophobic or hydrophilic interactions, formation of liposomes, micelles, or other heterogeneous composition) and covalent interactions (e. g., peptide bonds, bonds formed using cross-linking agents). In non-limiting examples, a gRNA or polynucleotide that encodes or is processed to the gRNA is provided as a liposomal complex with a cationic lipid; a gRNA or polynucleotide that encodes or is processed to the gRNA is provided as a complex with a carbon nanotube; and an RNA-guided nuclease is provided as a fusion protein between the nuclease and a cell-penetrating peptide. Examples of agents useful for delivering a gRNA or polynucleotide that encodes or is processed to the gRNA or a nuclease or polynucleotide that encodes the nuclease include the various cationic liposomes and polymer nanoparticles reviewed by Zhang et al. (2007) J. Controlled Release, 123:1-10, and the cross-linked multilamellar liposomes described in U. S. Patent Application Publication 2014/0356414 A1, incorporated by reference in its entirety herein.

[0085] In embodiments, the chemical agent is at least one selected from the group consisting of:
[0086] (a) solvents (e. g., water, dimethylsulfoxide, dimethylformamide, acetonitrile, N-pyrrolidine, pyridine, hexamethylphosphoramide, alcohols, alkanes, alkenes, dioxanes, polyethylene glycol, and other solvents miscible or emulsifiable with water or that will dissolve phosphonucleotides in non-aqueous systems);
[0087] (b) fluorocarbons (e. g., perfluorodecalin, perfluoromethyldecalin);
[0088] (c) glycols or polyols (e. g., propylene glycol, polyethylene glycol);
[0089] (d) surfactants, including cationic surfactants, anionic surfactants, non-ionic surfactants, and amphiphilic surfactants, e. g., alkyl or aryl sulfates, phosphates, sulfonates, or carboxylates; primary, secondary, or tertiary amines; quaternary ammonium salts; sultaines, betaines; cationic lipids; phospholipids; tallowamine; bile acids such as cholic acid; long chain alcohols; organosilicone surfactants including nonionic organosilicone surfactants such as trisiloxane ethoxylate surfactants or a silicone polyether copolymer such as a copolymer of polyalkylene oxide modified heptamethyl trisiloxane and allyloxypolypropylene glycol methylether (commercially available as SILWET L-77™ brand surfactant having CAS Number 27306-78-1 and EPA Number CAL. REG. NO. 5905-50073-AA, Momentive Performance Materials, Inc., Albany, N.Y.); specific examples of useful surfactants include sodium lauryl sulfate, the Tween series of surfactants, Triton-X100, Triton-X114, CHAPS and CHAPSO, Tergitol-type NP-40, Nonidet P-40;
[0090] (e) lipids, lipoproteins, lipopolysaccharides;
[0091] (f) acids, bases, caustic agents;
[0092] (g) peptides, proteins, or enzymes (e. g., cellulase, pectolyase, maceroenzyme, pectinase), including cell-penetrating or pore-forming peptides (e. g., (BO100)2K8, Genscript; poly-lysine, poly-arginine, or poly-homoarginine peptides; gamma zein, see U. S. Patent Application publication 2011/0247100, incorporated herein by reference in its entirety; transcription activator of human immunodeficiency virus type 1 (“HIV-1 Tat”) and other Tat proteins, see, e. g., www[dot]lifetein[dot]com/Cell_Penetrating_Peptides[dot]html and Järver (2012) Mol. Therapy Nucleic Acids, 1:e27, 1-17); octa-arginine or nona-arginine; poly-homoarginine (see Unnamalai et al. (2004) FEBS Letters. 566:307-310); see also the database of cell-penetrating peptides CPPsite 2.0 publicly available at crdd[dot]osdd[dot]net/raghava/cppsite/
[0093] (h) RNase inhibitors;
[0094] (i) cationic branched or linear polymers such as chitosan, poly-lysine. DEAE-dextran, polyvinylpyrrolidone (“PVP”), or polyethylenimine (“PEI”, e. g., PEI, branched, MW 25,000, CAS #9002-98-6; PEI, linear, MW 5000, CAS #9002-98-6; PEI linear, MW 2500, CAS #9002-98-6);
[0095] (j) dendrimers (see, e. g., U. S. Patent Application Publication 2011/0093982, incorporated herein by reference in its entirety);
[0096] (k) counter-ions, amines or polyamines (e. g., spermine, spermidine, putrescine), osmolytes, buffers, and salts (e. g., calcium phosphate, ammonium phosphate);
[0097] (l) polynucleotides (e. g., non-specific double-stranded DNA, salmon sperm DNA);
[0098] (m) transfection agents (e. g., Lipofectin®, Lipofectamine®, and Oligofectamine®, and Invivofectamine® (all from Thermo Fisher Scientific, Waltham, MA), PepFect (see Ezzat et al. (2011) Nucleic Acids Res., 39:5284-5298), TransIt® transfection reagents (Mirus Bio, LLC, Madison, WI), and poly-lysine, poly-homoarginine, and poly-arginine molecules including octo-arginine and nono-arginine as described in Lu et al. (2010) J. Agric. Food Chem., 58:2288-2294);
[0099] (n) antibiotics, including non-specific DNA double-strand-break-inducing agents (e. g., phleomycin, bleomycin, talisomycin); and
[0100] (o) antioxidants (e. g., glutathione, dithiothreitol, ascorbate).

[0101] In embodiments, the chemical agent is provided simultaneously with the gRNA (or polynucleotide encoding the gRNA or that is processed to the gRNA), for example, the polynucleotide composition including the gRNA further includes one or more chemical agent. In embodiments, the gRNA or polynucleotide encoding the gRNA or that is processed to the gRNA is covalently or non-covalently linked or complexed with one or more chemical agent; for example, the gRNA or polynucleotide encoding the gRNA or that is processed to the gRNA can be covalently linked to a peptide or protein (e. g., a cell-penetrating peptide or a pore-forming peptide) or non-covalently complexed with cationic lipids, polycations (e. g., polyamines), or cationic polymers (e. g., PEI). In embodiments, the gRNA or polynucleotide encoding the gRNA or that is processed to the gRNA is complexed with one or more chemical agents to form, e. g., a solution, liposome, micelle, emulsion, reverse emulsion, suspension, colloid, or gel.

[0102] In embodiments, the physical agent is at least one selected from the group consisting of particles or nanoparticles (e. g., particles or nanoparticles made of materials such as carbon, silicon, silicon carbide, gold, tungsten, polymers, or ceramics) in various size ranges and shapes, magnetic particles or nanoparticles (e. g., silenceMag Magnetotransfection™ agent, OZ Biosciences, San Diego, CA), abrasive or scarifying agents, needles or microneedles, matrices, and grids. In embodiments, particulates and nanoparticulates are useful in delivery of the polynucleotide composition or the nuclease or both. Useful particulates and nanoparticles include those made of metals (e. g., gold, silver, tungsten, iron, cerium), ceramics (e. g., aluminum oxide, silicon carbide, silicon nitride, tungsten carbide), polymers (e. g., polystyrene, polydiacetylene, and poly(3,4-ethylenedioxythiophene) hydrate), semiconductors (e. g., quantum dots), silicon (e. g., silicon carbide), carbon (e. g., graphite, graphene, graphene oxide, or carbon nanosheets, nanocomplexes, or nanotubes), and composites (e. g., polyvinylcarbazole/graphene, polystyrene/graphene, platinum/graphene, palladium/graphene nanocomposites). In embodiments, such particulates and nanoparticulates are further covalently or non-covalently functionalized, or further include modifiers or cross-linked materials such as polymers (e. g., linear or branched polyethylenimine, poly-lysine), polynucleotides (e. g., DNA or RNA), polysaccharides, lipids, polyglycols (e. g., polyethylene glycol, thiolated polyethylene glycol), polypeptides or proteins, and detectable labels (e. g., a fluorophore, an antigen, an antibody, or a quantum dot). In various embodiments, such particulates and nanoparticles are neutral, or carry a positive charge, or carry a negative charge. Embodiments of compositions including particulates include those formulated, e. g., as liquids, colloids, dispersions, suspensions, aerosols, gels, and solids. Embodiments include nanoparticles affixed to a surface or support, e. g., an array of carbon nanotubes vertically aligned on a silicon or copper wafer substrate. Embodiments include polynucleotide compositions including particulates (e. g., gold or tungsten or magnetic particles) delivered by a Biolistic-type technique or with magnetic force. The size of the particles used in Biolistics is generally in the “microparticle” range, for example, gold microcarriers in the 0.6, 1.0, and 1.6 micrometer size ranges (see, e. g., instruction manual for the Helios® Gene Gun System, Bio-Rad, Hercules, CA; Randolph-Anderson et al. (2015) “Sub-micron gold particles are superior to larger particles for efficient Biolistic® transformation of organelles and some cell types”, Bio-Rad US/EG Bulletin 2015), but successful Biolistics delivery using larger (40 nanometer) nanoparticles has been reported in cultured animal cells; see O'Brian and Lummis (2011) BMC Biotechnol., 11:66-71. Other embodiments of useful particulates are nanoparticles, which are generally in the nanometer (nm) size range or less than 1 micrometer, e. g., with a diameter of less than about 1 nm, less than about 3 nm, less than about 5 nm, less than about 10 nm, less than about 20 nm, less than about 40 nm, less than about 60 nm, less than about 80 nm, and less than about 100 nm. Specific, non-limiting embodiments of nanoparticles commercially available (all from Sigma-Aldrich Corp., St. Louis, MO) include gold nanoparticles with diameters of 5, 10, or 15 nm; silver nanoparticles with particle sizes of 10, 20, 40, 60, or 100 nm; palladium “nanopowder” of less than 25 nm particle size; single-, double-, and multi-walled carbon nanotubes, e. g., with diameters of 0.7-1.1, 1.3-2.3, 0.7-0.9, or 0.7-1.3 nm, or with nanotube bundle dimensions of 2-10 nm by 1-5 micrometers, 6-9 nm by 5 micrometers, 7-15 nm by 0.5-10 micrometers, 7-12 nm by 0.5-10 micrometers, 110-170 nm by 5-9 micrometers, 6-13 nm by 2.5-20 micrometers. Embodiments include polynucleotide compositions including materials such as gold, silicon, cerium, or carbon, e. g., gold or gold-coated nanoparticles, silicon carbide whiskers, carborundum, porous silica nanoparticles, gelatin/silica nanoparticles, nanoceria or cerium oxide nanoparticles (CNPs), carbon nanotubes (CNTs) such as single-, double-, or multi-walled carbon nanotubes and their chemically functionalized versions (e. g., carbon nanotubes functionalized with amide, amino, carboxylic acid, sulfonic acid, or polyethylene glycol moeities), and graphene or graphene oxide or graphene complexes; see, for example, Wong et al. (2016) Nano Lett., 16:1161-1172; Giraldo et al. (2014) Nature Materials, 13:400-409; Shen et al. (2012) Theranostics, 2:283-294; Kim et al. (2011) Bioconjugate Chem., 22:2558-2567; Wang et al. (2010) J. Am. Chem. Soc. Comm., 132:9274-9276; Zhao et al. (2016) Nanoscale Res. Lett., 11:195-203; and Choi et al. (2016) J. Controlled Release, 235:222-235. See also, for example, the various types of particles and nanoparticles, their preparation, and methods for their use, e. g., in delivering polynucleotides and polypeptides to cells, disclosed in U. S. Patent Application Publications 2010/0311168, 2012/0023619, 2012/0244569, 2013/0145488, 2013/0185823, 2014/0096284, 2015/0040268, 2015/0047074, and 2015/0208663, all of which are incorporated herein by reference in their entirety.

[0103] In embodiments wherein the gRNA (or polynucleotide encoding the gRNA) is provided in a composition that further includes an RNA-guided nuclease (or a polynucleotide that encodes the RNA-guided nuclease), or wherein the method further includes the step of providing an RNA-guided nuclease or a polynucleotide that encodes the RNA-guided nuclease, one or more one chemical, enzymatic, or physical agent can similarly be employed. In embodiments, the RNA-guided nuclease (or polynucleotide encoding the RNA-guided nuclease) is provided separately, e. g., in a separate composition including the RNA-guided nuclease or polynucleotide encoding the RNA-guided nuclease. Such compositions can include other chemical or physical agents (e. g., solvents, surfactants, proteins or enzymes, transfection agents, particulates or nanoparticulates), such as those described above as useful in the polynucleotide composition used to provide the gRNA. For example, porous silica nanoparticles are useful for delivering a DNA recombinase into maize cells; see, e. g., Martin-Ortigosa et al. (2015) Plant Physiol., 164:537-547. In an embodiment, the polynucleotide composition includes a gRNA and Cas9 nuclease, and further includes a surfactant and a cell-penetrating peptide. In an embodiment, the polynucleotide composition includes a plasmid that encodes both an RNA-guided nuclease and at least on gRNA, and further includes a surfactant and carbon nanotubes. In an embodiment, the polynucleotide composition includes multiple gRNAs and an mRNA encoding the RNA-guided nuclease, and further includes gold particles, and the polynucleotide composition is delivered to a plant cell or plant protoplast by Biolistics.

[0104] In related embodiments, one or more one chemical, enzymatic, or physical agent can be used in one or more steps separate from (preceding or following) that in which the gRNA is provided. In an embodiment, the plant or plant part from which a plant cell or plant protoplast is obtained or isolated is treated with one or more one chemical, enzymatic, or physical agent in the process of obtaining or isolating the plant cell or plant protoplast. In embodiments, the plant or plant part is treated with an abrasive, a caustic agent, a surfactant such as Silwet L-77 or a cationic lipid, or an enzyme such as cellulase.

[0105] In embodiments, a gRNA is delivered to plant cells or plant protoplasts prepared or obtained from a plant, plant part, or plant tissue that has been treated with the polynucleotide compositions (and optionally the nuclease). In embodiments, one or more one chemical, enzymatic, or physical agent, separately or in combination with the polynucleotide composition, is provided/applied at a location in the plant or plant part other than the plant location, part, or tissue from which the plant cell or plant protoplast is obtained or isolated. In embodiments, the polynucleotide composition is applied to adjacent or distal cells or tissues and is transported (e. g., through the vascular system or by cell-to-cell movement) to the meristem from which plant cells or plant protoplasts are subsequently isolated. In embodiments, a gRNA-containing composition is applied by soaking a seed or seed fragment or zygotic or somatic embryo in the gRNA-containing composition, whereby the gRNA is delivered to the seed or seed fragment or zygotic or somatic embryo from which plant cells or plant protoplasts are subsequently isolated. In embodiments, a flower bud or shoot tip is contacted with a gRNA-containing composition, whereby the gRNA is delivered to cells in the flower bud or shoot tip from which plant cells or plant protoplasts are subsequently isolated. In embodiments, a gRNA-containing composition is applied to the surface of a plant or of a part of a plant (e. g., a leaf surface), whereby the gRNA is delivered to tissues of the plant from which plant cells or plant protoplasts are subsequently isolated. In embodiments a whole plant or plant tissue is subjected to particle- or nanoparticle-mediated delivery (e. g., Biolistics or carbon nanotube or nanoparticle delivery) of a gRNA-containing composition, whereby the gRNA is delivered to cells or tissues from which plant cells or plant protoplasts are subsequently isolated.

### Methods of Modulating Expression of a Sequence of Interest in a Genome

[0106] In one aspect, the disclosure provides a method of changing expression of a sequence of interest in a genome, including integrating a sequence encoded by a polynucleotide (such as a double-stranded DNA, a single-stranded DNA, a single-stranded DNA/RNA hybrid, or a double-stranded DNA/RNA hybrid) donor molecule at the site of at least one double-strand break (DSB) in a genome. The method permits site-specific integration of heterologous sequence at the site of at least one DSB, and thus at one or more locations in a genome, such as a genome of a plant cell. In embodiments, the genome is that of a nucleus, mitochondrion, or plastid in a plant cell.

[0107] By “integration of heterologous sequence” is meant integration or insertion of one or more nucleotides, resulting in a sequence (including the inserted nucleotide(s) as well as at least some adjacent nucleotides of the genomic sequence flanking the site of insertion at the DSB) that is heterologous, i. e., would not otherwise or does not normally occur at the site of insertion. (The term “heterologous” is also used to refer to a given sequence in relationship to another—e. g., the sequence of the polynucleotide donor molecule is heterologous to the sequence at the site of the DSB wherein the polynucleotide is integrated.)

[0108] The at least one DSB is introduced into the genome by any suitable technique; in embodiments one or more DSBs is introduced into the genome in a site- or sequence-specific manner, for example, by use of at least one of the group of DSB-inducing agents consisting of: (a) a nuclease capable of effecting site-specific alteration of a target nucleotide sequence, selected from the group consisting of an RNA-guided nuclease, an RNA-guided DNA endonuclease, a type II Cas nuclease, a Cas9, a type V Cas nuclease, a Cpf1, a CasY, a CasX, a C2c1, a C2c3, a Cas12j, an engineered nuclease, a codon-optimized nuclease, a zinc-finger nuclease (ZFN), a transcription activator-like effector nuclease (TAL-effector nuclease), an Argonaute, and a meganuclease or engineered meganuclease; (b) a polynucleotide encoding one or more nucleases capable of effecting site-specific alteration (such as introduction of a DSB) of a target nucleotide sequence; and (c) a guide RNA (gRNA) for an RNA-guided nuclease, or a DNA encoding a gRNA for an RNA-guided nuclease. In embodiments, one or more DSBs is introduced into the genome by use of both a guide RNA (gRNA) and the corresponding RNA-guided nuclease. In an example, one or more DSBs is introduced into the genome by use of a ribonucleoprotein (RNP) that includes both a gRNA (e. g., a single-guide RNA or sgRNA that includes both a crRNA and a tracrRNA) and a Cas9. It is generally desirable that the sequence encoded by the polynucleotide donor molecule is integrated at the site of the DSB at high efficiency. One measure of efficiency is the percentage or fraction of the population of cells that have been treated with a DSB-inducing agent and polynucleotide donor molecule, and in which a sequence encoded by the polynucleotide donor molecule is successfully introduced at the DSB correctly located in the genome. The efficiency of genome editing including integration of a sequence encoded by a polynucleotide donor molecule at a DSB in the genome is assessed by any suitable method such as a heteroduplex cleavage assay or by sequencing, as described elsewhere in this disclosure. In various embodiments, the DSB is induced in the correct location in the genome at a comparatively high efficiency, e. g., at about 10, about 15, about 20, about 30, about 40, about 50, about 60, about 70, or about 80 percent efficiency, or at greater than 80, 85, 90, or 95 percent efficiency (measured as the percentage of the total population of cells in which the DSB is induced at the correct location in the genome). In various embodiments, a sequence encoded by the polynucleotide donor molecule is integrated at the site of the DSB at a comparatively high efficiency, e. g., at about 10, about 15, about 20, about 30, about 40, about 50, about 60, about 70, or about 80 percent efficiency, or at greater than 80, 85, 90, or 95 percent efficiency (measured as the percentage of the total population of cells in which the polynucleotide molecule is integrated at the site of the DSB in the correct location in the genome).

[0109] Apart from the CRISPR-type nucleases, other nucleases capable of effecting site-specific alteration of a target nucleotide sequence include zinc-finger nucleases (ZFNs), transcription activator-like effector nucleases (TAL-effector nucleases or TALENs), Argonaute proteins, and a meganuclease or engineered meganuclease. Zinc finger nucleases (ZFNs) are engineered proteins comprising a zinc finger DNA-binding domain fused to a nucleic acid cleavage domain, e. g., a nuclease. The zinc finger binding domains provide specificity and can be engineered to specifically recognize any desired target DNA sequence. For a review of the construction and use of ZFNs in plants and other organisms, see, e. g., Urnov et al. (2010) Nature Rev. Genet., 11:636-646. The zinc finger DNA binding domains are derived from the DNA-binding domain of a large class of eukaryotic transcription factors called zinc finger proteins (ZFPs). The DNA-binding domain of ZFPs typically contains a tandem array of at least three zinc “fingers” each recognizing a specific triplet of DNA. A number of strategies can be used to design the binding specificity of the zinc finger binding domain. One approach, termed “modular assembly”, relies on the functional autonomy of individual zinc fingers with DNA. In this approach, a given sequence is targeted by identifying zinc fingers for each component triplet in the sequence and linking them into a multifinger peptide. Several alternative strategies for designing zinc finger DNA binding domains have also been developed. These methods are designed to accommodate the ability of zinc fingers to contact neighboring fingers as well as nucleotides bases outside their target triplet. Typically, the engineered zinc finger DNA binding domain has a novel binding specificity, compared to a naturally-occurring zinc finger protein. Modification methods include, for example, rational design and various types of selection. Rational design includes, for example, the use of databases of triplet (or quadruplet) nucleotide sequences and individual zinc finger amino acid sequences, in which each triplet or quadruplet nucleotide sequence is associated with one or more amino acid sequences of zinc fingers which bind the particular triplet or quadruplet sequence. See, e. g., U.S. Pat. Nos. 6,453,242 and 6,534,261, both incorporated herein by reference in their entirety. Exemplary selection methods (e. g., phage display and yeast two-hybrid systems) are well known and described in the literature. In addition, enhancement of binding specificity for zinc finger binding domains has been described in U.S. Pat. No. 6,794,136, incorporated herein by reference in its entirety. In addition, individual zinc finger domains may be linked together using any suitable linker sequences. Examples of linker sequences are publicly known, e. g., see U.S. Pat. Nos. 6,479,626; 6,903,185; and 7,153,949, incorporated herein by reference in their entirety. The nucleic acid cleavage domain is non-specific and is typically a restriction endonuclease, such as Fokl. This endonuclease must dimerize to cleave DNA. Thus, cleavage by Fokl as part of a ZFN requires two adjacent and independent binding events, which must occur in both the correct orientation and with appropriate spacing to permit dimer formation. The requirement for two DNA binding events enables more specific targeting of long and potentially unique recognition sites. Fokl variants with enhanced activities have been described; see, e. g., Guo et al (2010) J. Mol. Biol., 400:96-107.

[0110] Transcription activator like effectors (TALEs) are proteins secreted by certain Xanthomonas species to modulate gene expression in host plants and to facilitate the colonization by and survival of the bacterium. TALEs act as transcription factors and modulate expression of resistance genes in the plants. Recent studies of TALEs have revealed the code linking the repetitive region of TALEs with their target DNA-binding sites. TALEs comprise a highly conserved and repetitive region consisting of tandem repeats of mostly 33 or 34 amino acid segments. The repeat monomers differ from each other mainly at amino acid positions 12 and 13. A strong correlation between unique pairs of amino acids at positions 12 and 13 and the corresponding nucleotide in the TALE-binding site has been found. The simple relationship between amino acid sequence and DNA recognition of the TALE binding domain allows for the design of DNA binding domains of any desired specificity. TALEs can be linked to a non-specific DNA cleavage domain to prepare genome editing proteins, referred to as TAL-effector nucleases or TALENs. As in the case of ZFNs, a restriction endonuclease, such as Fokl, can be conveniently used. For a description of the use of TALENs in plants, see Mahfouz et al. (2011) Proc. Natl. Acad. Sci. USA, 108:2623-2628 and Mahfouz (2011) GM Crops, 2:99-103.

[0111] Argonauts are proteins that can function as sequence-specific endonucleases by binding a polynucleotide (e. g., a single-stranded DNA or single-stranded RNA) that includes sequence complementary to a target nucleotide sequence) that guides the Argonaut to the target nucleotide sequence and effects site-specific alteration of the target nucleotide sequence; see, e. g., U. S. Patent Application Publication 2015/0089681, incorporated herein by reference in its entirety.

[0112] Another method of effecting targeted changes to a genome is the use of triple-forming peptide nucleic acids (PNAs) designed to bind site-specifically to genomic DNA via strand invasion and the formation of PNA/DNA/PNA triplexes (via both Watson-Crick and Hoogsteen binding) with a displaced DNA strand. PNAs consist of a charge neutral peptide-like backbone and nucleobases. The nucleobases hybridize to DNA with high affinity. The triplexes then recruit the cell's endogenous DNA repair systems to initiate site-specific modification of the genome. The desired sequence modification is provided by single-stranded ‘donor DNAs’ which are co-delivered as templates for repair. See, e. g., Bahal R et al (2016) Nature Communications, Oct. 26, 2016.

[0113] In related embodiments, zinc finger nucleases, TALENs, and Argonautes are used in conjunction with other functional domains. For example, the nuclease activity of these nucleic acid targeting systems can be altered so that the enzyme binds to but does not cleave the DNA. Examples of functional domains include transposase domains, integrase domains, recombinase domains, resolvase domains, invertase domains, protease domains, DNA methyltransferase domains, DNA hydroxylmethylase domains, DNA demethylase domains, histone acetylase domains, histone deacetylase domains, nuclease domains, repressor domains, activator domains, nuclear-localization signal domains, transcription-regulatory protein (or transcription complex recruiting) domains, cellular uptake activity associated domains, nucleic acid binding domains, antibody presentation domains, histone modifying enzymes, recruiter of histone modifying enzymes; inhibitor of histone modifying enzymes, histone methyltransferases, histone demethylases, histone kinases, histone phosphatases, histone ribosylases, histone deribosylases, histone ubiquitinases, histone deubiquitinases, histone biotinases and histone tail proteases. Non-limiting examples of functional domains include a transcriptional activation domain, a transcription repression domain, and an SHH1, SUVH2, or SUVH9 polypeptide capable of reducing expression of a target nucleotide sequence via epigenetic modification; see, e. g., U. S. Patent Application Publication 2016/0017348, incorporated herein by reference in its entirety Genomic DNA may also be modified via base editing using a fusion between a catalytically inactive Cas9 (dCas9) is fused to a cytidine deaminase which convert cytosine (C) to uridine (U), thereby effecting a C to T substitution; see Komor et al. (2016) Nature, 533:420-424.

[0114] In embodiments, the guide RNA (gRNA) has a sequence of between 16-24 nucleotides in length (e. g., 16, 17, 18, 19, 20, 21, 22, 23, or 24 nucleotides in length). Specific embodiments include gRNAs of 19, 20, or 21 nucleotides in length and having 100% complementarity to the target nucleotide sequence. In many embodiments the gRNA has exact complementarity (i.e., perfect base-pairing) to the target nucleotide sequence; in certain other embodiments the gRNA has less than 100% complementarity to the target nucleotide sequence. The design of effective gRNAs for use in plant genome editing is disclosed in U. S. Patent Application Publication 2015/0082478 A 1, the entire specification of which is incorporated herein by reference. In embodiments where multiple gRNAs are employed, the multiple gRNAs can be delivered separately (as separate RNA molecules or encoded by separate DNA molecules) or in combination, e. g., as an RNA molecule containing multiple gRNA sequences, or as a DNA molecule encoding an RNA molecule containing multiple gRNA sequences; see, for example, U. S. Patent Application Publication 2016/0264981 A 1, the entire specification of which is incorporated herein by reference, which discloses RNA molecules including multiple RNA sequences (such as gRNA sequences) separated by tRNA cleavage sequences. In other embodiments, a DNA molecule encodes multiple gRNAs which are separated by other types of cleavable transcript, for example, small RNA (e. g., miRNA, siRNA, or ta-siRNA) recognition sites which can be cleaved by the corresponding small RNA, or dsRNA-forming regions which can be cleaved by a Dicer-type ribonuclease, or sequences which are recognized by RNA nucleases such as Cys4 ribonuclease from Pseudomonas aeruginosa; see, e. g., U.S. Pat. No. 7,816,581, the entire specification of which is incorporated herein by reference, which discloses in FIG. 27 and elsewhere in the specification pol II promoter-driven DNA constructs encoding RNA transcripts that are released by cleavage. Efficient Cas9-mediated gene editing has been achieved using a chimeric “single guide RNA” (“sgRNA”), an engineered (synthetic) single RNA molecule that mimics a naturally occurring crRNA-tracrRNA complex and contains both a tracrRNA (for binding the nuclease) and at least one crRNA (to guide the nuclease to the sequence targeted for editing). In other embodiments, self-cleaving ribozyme sequences can be used to separate multiple gRNA sequences within a transcript.

[0115] Thus, in certain embodiments wherein the nuclease is a Cas9-type nuclease, the gRNA can be provided as a polynucleotide composition including: (a) a CRISPR RNA (crRNA) that includes the gRNA together with a separate tracrRNA, or (b) at least one polynucleotide that encodes a crRNA and a tracrRNA (on a single polynucleotide or on separate polynucleotides), or (c) at least one polynucleotide that is processed into one or more crRNAs and a tracrRNA. In other embodiments wherein the nuclease is a Cas9-type nuclease, the gRNA can be provided as a polynucleotide composition including a CRISPR RNA (crRNA) that includes the gRNA, and the required tracrRNA is provided in a separate composition or in a separate step, or is otherwise provided to the cell (for example, to a plant cell or plant protoplast that stably or transiently expresses the tracrRNA from a polynucleotide encoding the tracrRNA). In other embodiments wherein the nuclease is a Cas9-type nuclease, the gRNA can be provided as a polynucleotide composition comprising: (a) a single guide RNA (sgRNA) that includes the gRNA, or (b) a polynucleotide that encodes a sgRNA, or (c) a polynucleotide that is processed into a sgRNA. Cpf1-mediated gene editing does not require a tracrRNA; thus, in embodiments wherein the nuclease is a Cpf1-type nuclease, the gRNA is provided as a polynucleotide composition comprising (a) a CRISPR RNA (crRNA) that includes the gRNA, or (b) a polynucleotide that encodes a crRNA, or (c) a polynucleotide that is processed into a crRNA. In embodiments, the gRNA-containing composition optionally includes an RNA-guided nuclease, or a polynucleotide that encodes the RNA-guided nuclease. In other embodiments, an RNA-guided nuclease or a polynucleotide that encodes the RNA-guided nuclease is provided in a separate step. In some embodiments of the method, a gRNA is provided to a cell (e. g., a plant cell or plant protoplast) that includes an RNA-guided nuclease or a polynucleotide that encodes an RNA-guided nuclease, e. g., an RNA-guided nuclease selected from the group consisting of an RNA-guided DNA endonuclease, a type II Cas nuclease, a Cas9, a type V Cas nuclease, a Cpf1, a CasY, a CasX, a C2c1, a C2c3, an engineered RNA-guided nuclease, and a codon-optimized RNA-guided nuclease; in an example, the cell (e. g., a plant cell or plant protoplast) stably or transiently expresses the RNA-guided nuclease. In embodiments, the polynucleotide that encodes the RNA-guided nuclease is, for example, DNA that encodes the RNA-guided nuclease and is stably integrated in the genome of a plant cell or plant protoplast, DNA or RNA that encodes the RNA-guided nuclease and is transiently present in or introduced into a plant cell or plant protoplast; such DNA or RNA can be introduced, e. g., by using a vector such as a plasmid or viral vector or as an mRNA, or as vector-less DNA or RNA introduced directly into a plant cell or plant protoplast.

[0116] In embodiments that further include the step of providing to a cell (e. g., a plant cell or plant protoplast) an RNA-guided nuclease or a polynucleotide that encodes the RNA-guided nuclease, the RNA-guided nuclease is provided simultaneously with the gRNA-containing composition, or in a separate step that precedes or follows the step of providing the gRNA-containing composition. In embodiments, the gRNA-containing composition further includes an RNA-guided nuclease or a polynucleotide that encodes the RNA-guided nuclease. In other embodiments, there is provided a separate composition that includes an RNA-guided nuclease or a polynucleotide that encodes the RNA-guided nuclease. In embodiments, the RNA-guided nuclease is provided as a ribonucleoprotein (RNP) complex, e. g., a preassembled RNP that includes the RNA-guided nuclease complexed with a polynucleotide including the gRNA or encoding a gRNA, or a preassembled RNP that includes a polynucleotide that encodes the RNA-guided nuclease (and optionally encodes the gRNA, or is provided with a separate polynucleotide including the gRNA or encoding a gRNA), complexed with a protein. In embodiments, the RNA-guided nuclease is a fusion protein, i. e., wherein the RNA-guided nuclease (e. g., Cas9, Cpf1, CasY, CasX, C2c1, or C2c3) is covalently bound through a peptide bond to a cell-penetrating peptide, a nuclear localization signal peptide, a chloroplast transit peptide, or a mitochondrial targeting peptide; such fusion proteins are conveniently encoded in a single nucleotide sequence, optionally including codons for linking amino acids. In embodiments, the RNA-guided nuclease or a polynucleotide that encodes the RNA-guided nuclease is provided as a complex with a cell-penetrating peptide or other transfecting agent. In embodiments, the RNA-guided nuclease or a polynucleotide that encodes the RNA-guided nuclease is complexed with, or covalently or non-covalently bound to, a further element, e. g., a carrier molecule, an antibody, an antigen, a viral movement protein, a polymer, a detectable label (e. g., a moiety detectable by fluorescence, radioactivity, or enzymatic or immunochemical reaction), a quantum dot, or a particulate or nanoparticulate. In embodiments, the RNA-guided nuclease or a polynucleotide that encodes the RNA-guided nuclease is provided in a solution, or is provided in a liposome, micelle, emulsion, reverse emulsion, suspension, or other mixed-phase composition.

[0117] An RNA-guided nuclease can be provided to a cell (e. g., a plant cell or plant protoplast) by any suitable technique. In embodiments, the RNA-guided nuclease is provided by directly contacting a plant cell or plant protoplast with the RNA-guided nuclease or the polynucleotide that encodes the RNA-guided nuclease. In embodiments, the RNA-guided nuclease is provided by transporting the RNA-guided nuclease or a polynucleotide that encodes the RNA-guided nuclease into a plant cell or plant protoplast using a chemical, enzymatic, or physical agent as provided in detail in the paragraphs following the heading “Delivery Methods and Delivery Agents”. In embodiments, the RNA-guided nuclease is provided by bacterially mediated (e. g., Agrobacterium sp., Rhizobium sp., Sinorhizobium sp., Mesorhizobium sp., Bradyrhizobium sp., Azobacter sp., Phyllobacterium sp.) transfection of a plant cell or plant protoplast with a polynucleotide encoding the RNA-guided nuclease; see, e. g., Broothaerts et al. (2005) Nature, 433:629-633. In an embodiment, the RNA-guided nuclease is provided by transcription in a plant cell or plant protoplast of a DNA that encodes the RNA-guided nuclease and is stably integrated in the genome of the plant cell or plant protoplast or that is provided to the plant cell or plant protoplast in the form of a plasmid or expression vector (e. g., a viral vector) that encodes the RNA-guided nuclease (and optionally encodes one or more gRNAs, crRNAs, or sgRNAs, or is optionally provided with a separate plasmid or vector that encodes one or more gRNAs, crRNAs, or sgRNAs). In embodiments, the RNA-guided nuclease is provided to the plant cell or plant protoplast as a polynucleotide that encodes the RNA-guided nuclease, e. g., in the form of an mRNA encoding the nuclease.

[0118] Where a polynucleotide is concerned (e. g., a crRNA that includes the gRNA together with a separate tracrRNA, or a crRNA and a tracrRNA encoded on a single polynucleotide or on separate polynucleotides, or at least one polynucleotide that is processed into one or more crRNAs and a tracrRNA, or a sgRNA that includes the gRNA, or a polynucleotide that encodes a sgRNA, or a polynucleotide that is processed into a sgRNA, or a polynucleotide that encodes the RNA-guided nuclease), embodiments of the polynucleotide include: (a) double-stranded RNA; (b) single-stranded RNA; (c) chemically modified RNA; (d) double-stranded DNA; (e) single-stranded DNA; (f) chemically modified DNA; or (g) a combination of (a)-(f). Where expression of a polynucleotide is involved (e. g., expression of a crRNA from a DNA encoding the crRNA, or expression and translation of a RNA-guided nuclease from a DNA encoding the nuclease), in some embodiments it is sufficient that expression be transient, i. e., not necessarily permanent or stable in the cell. Certain embodiments of the polynucleotide further include additional nucleotide sequences that provide useful functionality; non-limiting examples of such additional nucleotide sequences include an aptamer or riboswitch sequence, nucleotide sequence that provides secondary structure such as stem-loops or that provides a sequence-specific site for an enzyme (e. g., a sequence-specific recombinase or endonuclease site), T-DNA (e. g., DNA sequence encoding a gRNA, crRNA, tracrRNA, or sgRNA is enclosed between left and right T-DNA borders from Agrobacterium spp. or from other bacteria that infect or induce tumours in plants), a DNA nuclear-targeting sequence, a regulatory sequence such as a promoter sequence, and a transcript-stabilizing sequence. Certain embodiments of the polynucleotide include those wherein the polynucleotide is complexed with, or covalently or non-covalently bound to, a non-nucleic acid element, e. g., a carrier molecule, an antibody, an antigen, a viral movement protein, a cell-penetrating or pore-forming peptide, a polymer, a detectable label, a quantum dot, or a particulate or nanoparticulate.

[0119] In embodiments, the at least one DSB is introduced into the genome by at least one treatment selected from the group consisting of: (a) bacterially mediated (e. g., Agrobacterium sp., Rhizobium sp., Sinorhizobium sp., Mesorhizobium sp., Bradyrhizobium sp., Azobacter sp., Phyllobacterium sp.) transfection with a DSB-inducing agent, (b) Biolistics or particle bombardment with a DSB-inducing agent; (c) treatment with at least one chemical, enzymatic, or physical agent as provided in detail in the paragraphs following the heading “Delivery Methods and Delivery Agents”; and (d) application of heat or cold, ultrasonication, centrifugation, positive or negative pressure, cell wall or membrane disruption or deformation, or electroporation. It is generally desirable that introduction of the at least one DSB into the genome (i. e., the “editing” of the genome) is achieved with sufficient efficiency and accuracy to ensure practical utility. One measure of efficiency is the percentage or fraction of the population of cells that have been treated with a DSB-inducing agent and in which the DSB is successfully introduced at the correct site in the genome. The efficiency of genome editing is assessed by any suitable method such as a heteroduplex cleavage assay or by sequencing, as described elsewhere in this disclosure. Accuracy is indicated by the absence of, or minimal occurrence of, off-target introduction of a DSB (i. e., at other than the intended site in the genome).

[0120] The location where the at least one DSB is inserted varies according to the desired result, for example whether the intention is to simply disrupt expression of the sequence of interest, or to add functionality (such as placing expression of the sequence of interest under inducible control). Thus, the location of the DSB is not necessarily within or directly adjacent to the sequence of interest. In embodiments, the at least one DSB in a genome is located: (a) within the sequence of interest, (b) upstream of (i. e., 5′ to) the sequence of interest, or (c) downstream of (i. e., 3′ to) the sequence of interest. In embodiments, a sequence encoded by the polynucleotide (such as a double-stranded DNA, a single-stranded DNA, a single-stranded DNA/RNA hybrid, or a double-stranded DNA/RNA hybrid) donor molecule, when integrated into the genome, is functionally or operably linked (e. g., linked in a manner that modifies the transcription or the translation of the sequence of interest or that modifies the stability of a transcript including that of the sequence of interest) to the sequence of interest. In embodiments, a sequence encoded by the polynucleotide donor molecule is integrated at a location 5′ to and operably linked to the sequence of interest, wherein the integration location is selected to provide a specifically modulated (upregulated or downregulated) level of expression of the sequence of interest. For example, a sequence encoded by the polynucleotide donor molecule is integrated at a specific location in the promoter region of a protein-encoding gene that results in a desired expression level of the protein; in an embodiment, the appropriate location is determined empirically by integrating a sequence encoded by the polynucleotide donor molecule at about 50, about 100, about 150, about 200, about 250, about 300, about 350, about 400, about 450, and about 500 nucleotides 5′ to (upstream of) the start codon of the coding sequence, and observing the relative expression levels of the protein for each integration location.

[0121] Insertion and/or creation of regulatory regions in the GmDR1 gene which result in increased expression (i.e., upregulation) of the endogenous GmDR1 gene relative to a reference plant lacking the modification are provided herein. Such increases in of expression in the GmDR1 gene result in soybean plants exhibiting an improvement in resistance to a pest or pathogen in the modified soybean plant relative to the reference plant lacking the modification. In certain embodiments, target modifications can comprise insertion and/or creation of the upregulatory region upstream (5′ of), downstream of (3′ of), or within a GmDR1 promoter, 5′ untranslated region (5′ UTR), or 3′ untranslated region (3′UTR) set forth in SEQ ID NO: 764 or in SEQ ID NO: 766, or in an allelic variant of the promoter, 5′ UTR, or 3′UTR. In certain embodiments, the upregulatory sequence is created in a manner that maintains at least some of the spacing and/or identity of endogenous regulatory sequences present in the endogenous GmDR1 gene, promoter, or 5′UTR. Spacing can be maintained by replacing (i.e., substituting) sequences with an equivalent number of base pairs (e.g., 10 bp of endogenous sequence is replaced with about 9, 10, 11, 15, 20, 25, 30, 36, 40, 45, or 50 bp of upregulatory sequence). In other embodiments, spacing can be maintained by replacing (i.e., substituting) sequences comprising about 9, 10, 15, 20, 25, or 30 bp to about 40, 45, or 50 bp of GmDR1 endogenous promoter, 5′ UTR, 3′UTR, or other GmDR1 gene sequence with about 9, 10, 15, 20, 25, or 30 bp to about 40, 45, or 50 bp of upregulatory sequence. In certain embodiments, identity of endogenous GmDR1 sequence elements can be maintained in part by identifying regions of the endogenous GmDR1 sequence which correspond in part to the sequence of a desired upregulatory sequence (e.g., an enhancer of SEQ ID NO: 184 and/or other sequence set forth in Table 9) and modifying the sequence (e.g., by insertion, partial insertion, and/or replacement) such that it contains a sequence which corresponds in full to the desired upregulatory sequence. Illustrative and non-limiting examples of modifications of a GmDR1 promoter which preserve spacing and/or identity of sequences present in the endogenous GmDR1 promoter and 5′UTR are set forth in Example 26. In certain embodiments, modifications of a GmDR1 promoter and 5′ UTR are achieved by creating or inserting a desired upregulatory sequence (e.g., an enhancer of SEQ ID NO: 184, multimer thereof including a trimer, and/or other sequence set forth in Table 9) encoded by polynucleotide donor molecule comprising all or a portion of an upregulatory sequence at about 10, about 20, about 30, about 40, about 50, about 60, about 80, about 100, about 150, about 200, about 250, about 300, about 350, about 400, about 450, and about 500 nucleotides 5′ to (upstream of) the start codon of the GmDR1 coding sequence in the GmDR1 gene of SEQ ID NO: 762 or an allelic variant thereof. In certain embodiments, the desired upregulatory sequences (e. g., an enhancer of SEQ ID NO: 184, multimer thereof including a trimer, and/or other sequence set forth in Table 9) are created or inserted within a GmDR1 promoter of SEQ ID NO: 764 or in an allelic variant thereof at a position corresponding to: (a) nucleotides 1-40 of SEQ ID NO: 764; (b) nucleotides 20-60 of SEQ ID NO: 764; (c) nucleotides 41-80 of SEQ ID NO: 764; (d) nucleotides 61-100 of SEQ ID NO:764. (e) nucleotides 81-120 of SEQ ID NO: 764; (f) nucleotides 101-140 of SEQ ID NO: 764; (g) nucleotides 121-160 of SEQ ID NO: 764; (h) nucleotides 141-180 of SEQ ID NO: 764; (i) nucleotides 161-200 of SEQ ID NO:764; (j) nucleotides 181-220 of SEQ ID NO: 764; (k) nucleotides 201-240 of SEQ ID NO: 764; (l) nucleotides 221-260 of SEQ ID NO:764; (m) nucleotides 241-280 of SEQ ID NO: 764; (n) nucleotides 261-300 of SEQ ID NO: 764; (o) nucleotides 281-320 of SEQ ID NO: 764; (p) nucleotides 301-340 of SEQ ID NO: 764; (q) nucleotides 321-360 of SEQ ID NO:764; (r) nucleotides 341-380 of SEQ ID NO: 764; (s) nucleotides 361-400 of SEQ ID NO:764; (t) nucleotides 381-420 of SEQ ID NO: 764; (u) nucleotides 401440 of SEQ ID NO: 764; (v) nucleotides 421-460 of SEQ ID NO:764; (w) nucleotides 441-480 of SEQ ID NO: 764; (x) nucleotides 461-500 of SEQ ID NO: 764; and/or (y) nucleotides 481-516 of SEQ ID NO: 764. In certain embodiments, the desired upregulatory sequences (e.g., an enhancer of SEQ ID NO: 184, multimer thereof including a trimer, and/or other sequence set forth in Table 9) are created or inserted within a GmDR1 5′ UTR of SEQ ID NO: 764 or in an allelic variant thereof at a position corresponding to: (a) nucleotides 520-540 of SEQ ID NO: 764; (b) nucleotides 530-550 of SEQ ID NO: 764; (c) nucleotides 541-560 of SEQ ID NO: 764; (d) nucleotides 551-570 of SEQ ID NO:764; and/or (e) nucleotides 561-583 of SEQ ID NO: 764; (f) nucleotides 101-140 of SEQ ID NO: 764; and/or (g) nucleotides 121-160 of SEQ ID NO: 764. In certain embodiments, an enhancer element of SEQ ID NO:183, SEQ ID NO: 184, functional equivalent thereof, or multimer (e.g., trimer) thereof is inserted or created at one or more of the aforementioned positions in a GmDR1 promoter or 5′UTR of SEQ ID NO: 764 or in an allelic variant thereof. In certain embodiments, at least one enhancer element of SEQ ID NO: 184, functional equivalent thereof, or multimer (e.g., trimer) thereof is created or inserted at residues 130 to 157, 300 to 306, and/or 520 to 525 of SEQ ID NO:764 or in a corresponding position in an allelic variant thereof. In certain embodiments, the endogenous GmDR1 gene set forth in SEQ ID NO: 762 may express a transcript with a 5′ end located at about nucleotide 481 of SEQ ID NO: 764 (See Glyma.10G094800.1 cDNA entry in the “soykb.org” internet site; Joshi et al. 2017, DOI: 10.1007/978-1-4939-6658-5_7). In such instances, it is understood that an insertion or insertion/substitution of an upregulatory element between nucleotides 481 to 516 can also be considered an insertion in a 5′UTR of the GmDR1 gene.

[0122] In embodiments, the donor polynucleotide sequence of interest includes coding (protein-coding) sequence, non-coding (non-protein-coding) sequence, or a combination of coding and non-coding sequence. Embodiments include a plant nuclear sequence, a plant plastid sequence, a plant mitochondrial sequence, a sequence of a symbiont, pest, or pathogen of a plant, and combinations thereof. Embodiments include exons, introns, regulatory sequences including promoters, other 5′ elements and 3′ elements, and genomic loci encoding non-coding RNAs including long non-coding RNAs (lncRNAs), microRNAs (miRNAs), and trans-acting siRNAs (ta-siRNAs). In embodiments, multiple sequences are altered, for example, by delivery of multiple gRNAs to the plant cell or plant protoplast; the multiple sequences can be part of the same gene (e. g., different locations in a single coding region or in different exons or introns of a protein-coding gene) or different genes. In embodiments, the sequence of an endogenous genomic locus is altered to delete, add, or modify a functional non-coding sequence; in non-limiting examples, such functional non-coding sequences include, e. g., a miRNA, siRNA, or ta-siRNA recognition or cleavage site, a splice site, a recombinase recognition site, a transcription factor binding site, or a transcriptional or translational enhancer or repressor sequence.

[0123] In embodiments, the disclosure provides a method of changing expression of a sequence of interest in a genome, including integrating a sequence encoded by a polynucleotide (such as a double-stranded DNA, a single-stranded DNA, a single-stranded DNA/RNA hybrid, or a double-stranded DNA/RNA hybrid) donor molecule at the site of two or more DSBs in a genome. In embodiments, the sequence of the polynucleotide donor molecule that is integrated into each of the two or more DSBs is (a) identical, or (b) different, for each of the DSBs. In embodiments, the change in expression of a sequence of interest in genome is manifested as the expression of an altered or edited sequence of interest; in non-limiting examples, the method is used to integrate sequence-specific recombinase recognition site sequences at two DSBs in a genome, whereby, in the presence of the corresponding site-specific DNA recombinase, the genomic sequence flanked on either side by the integrated recombinase recognition sites is excised from the genome (or in some instances is inverted); such an approach is useful, e. g., for deletion of larger lengths of genomic sequence, for example, deletion of all or part of an exon or of one or more protein domains. In other embodiments, at least two DSBs are introduced into a genome by one or more nucleases in such a way that genomic sequence is deleted between the DSBs (leaving a deletion with blunt ends, overhangs or a combination of a blunt end and an overhang), and a sequence encoded by at least one polynucleotide donor molecule is integrated between the DSBs (i. e., a sequence encoded by at least one individual polynucleotide donor molecule is integrated at the location of the deleted genomic sequence), wherein the genomic sequence that is deleted is coding sequence, non-coding sequence, or a combination of coding and non-coding sequence; such embodiments provide the advantage of not requiring a specific PAM site at or very near the location of a region wherein a nucleotide sequence change is desired. In an embodiment, at least two DSBs are introduced into a genome by one or more nucleases in such a way that genomic sequence is deleted between the DSBs (leaving a deletion with blunt ends, overhangs or a combination of a blunt end and an overhang), and at least one sequence encoded by a polynucleotide donor molecule is integrated between the DSBs (i. e., at least one individual sequence encoded by a polynucleotide donor molecule is integrated at the location of the deleted genomic sequence). In an embodiment, two DSBs are introduced into a genome, resulting in excision or deletion of genomic sequence between the sites of the two DSBs, and a sequence encoded by a polynucleotide donor molecule integrated into the genome at the location of the deleted genomic sequence (that is, a sequence encoded by an individual polynucleotide donor molecule is integrated between the two DSBs). Generally, the polynucleotide donor molecule with the sequence to be integrated into the genome is selected in terms of the presence or absence of terminal overhangs to match the type of DSBs introduced. In an embodiment, two blunt-ended DSBs are introduced into a genome, resulting in excision or deletion of genomic sequence between the sites of the two blunt-ended DSBs, and a sequence encoded by a blunt-ended double-stranded DNA or blunt-ended double-stranded DNA/RNA hybrid or a single-stranded DNA or a single-stranded DNA/RNA hybrid donor molecule is integrated into the genome between the two blunt-ended DSBs. In another embodiment, two DSBs are introduced into a genome, wherein the first DSB is blunt-ended and the second DSB has an overhang, resulting in deletion of genomic sequence between the two DSBs, and a sequence encoded by a double-stranded DNA or double-stranded DNA/RNA hybrid donor molecule that is blunt-ended at one terminus and that has an overhang on the other terminus (or, alternatively, a single-stranded DNA or a single-stranded DNA/RNA hybrid molecule) is integrated into the genome between the two DSBs; in an alternative embodiment, two DSBs are introduced into a genome, wherein both DSBs have overhangs but of different overhang lengths (different number of unpaired nucleotides), resulting in deletion of genomic sequence between the two DSBs, and a sequence encoded by a double-stranded DNA or double-stranded DNA/RNA hybrid donor molecule that has overhangs at each terminus, wherein the overhangs are of unequal lengths (or, alternatively, a single-stranded DNA or a single-stranded DNA/RNA hybrid donor molecule), is integrated into the genome between the two DSBs; embodiments with such DSB asymmetry (i. e., a combination of DSBs having a blunt end and an overhang, or a combination of DSBs having overhangs of unequal lengths) provide the opportunity for controlling directionality or orientation of the inserted polynucleotide, e. g., by selecting a double-stranded DNA or double-stranded DNA/RNA hybrid donor molecule having one blunt end and one terminus with unpaired nucleotides, such that the polynucleotide is integrated preferably in one orientations. In another embodiment, two DSBs, each having an overhang, are introduced into a genome, resulting in excision or deletion of genomic sequence between the sites of the two DSBs, and a sequence encoded by a double-stranded DNA or double-stranded DNA/RNA hybrid donor molecule that has an overhang at each terminus (or, alternatively, a single-stranded DNA or a single-stranded DNA/RNA hybrid donor molecule) is integrated into the genome between the two DSBs. The length of genomic sequence that is deleted between two DSBs and the length of a sequence encoded by the polynucleotide donor molecule that is integrated in place of the deleted genomic sequence can be, but need not be equal. In embodiments, the distance between any two DSBs (or the length of the genomic sequence that is to be deleted) is at least 10, at least 15, at least 20, at least 25, at least 30, at least 40, at least 50, at least 60, at least 70, at least 80, or at least 100 nucleotides; in other embodiments the distance between any two DSBs (or the length of the genomic sequence that is to be deleted) is at least 100, at least 150, at least 200, at least 300, at least 400, at least 500, at least 600, at least 750, or at least 1000 nucleotides. In embodiments where more than two DSBs are introduced into genomic sequence, it is possible to effect different deletions of genomic sequence (for example, where three DSBs are introduced, genomic sequence can be deleted between the first and second DSBs, between the first and third DSBs, and between the second and third DSBs). In some embodiments, a sequence encoded by more than one polynucleotide donor molecule (e. g., multiple copies of a sequence encoded by a polynucleotide donor molecule having a given sequence, or multiple sequences encoded by polynucleotide donor molecules with two or more different sequences) is integrated into the genome. For example, different sequences encoded by individual polynucleotide donor molecules can be individually integrated at a single locus where genomic sequence has been deleted between two DSBs, or at multiple locations where genomic sequence has been deleted (e. g., where more than two DSBs have been introduced into the genome). In embodiments, at least one exon is replaced by integrating a sequence encoded by at least one polynucleotide molecule where genomic sequence is deleted between DSBs that were introduced by at least one sequence-specific nuclease into intronic sequence flanking the at least one exon; an advantage of this approach over an otherwise similar method (i. e., differing by having the DSBs introduced into coding sequence instead of intronic sequence) is the avoidance of inaccuracies (nucleotide changes, deletions, or additions at the nuclease cleavage sites) in the resulting exon sequence or messenger RNA.

[0124] In embodiments, the methods described herein are used to delete or replace genomic sequence, which can be a relatively large sequence (e. g., all or part of at least one exon or of a protein domain) resulting in the equivalent of an alternatively spliced transcript. Additional related aspects include compositions and reaction mixtures including a plant cell or a plant protoplast and at least two guide RNAs, wherein each guide RNA is designed to effect a DSB in intronic sequence flanking at least one exon; such compositions and reaction mixtures optionally include at least one sequence-specific nuclease capable of being guided by at least one of the guide RNAs to effect a DSB in genomic sequence, and optionally include a polynucleotide donor molecule that is capable of being integrated (or having its sequence integrated) into the genome at the location of at least one DSB or at the location of genomic sequence that is deleted between the DSBs.

[0125] Donor Polynucleotide Molecules: Embodiments of the polynucleotide donor molecule having a sequence that is integrated at the site of at least one double-strand break (DSB) in a genome include double-stranded DNA, a single-stranded DNA, a single-stranded DNA/RNA hybrid, and a double-stranded DNA/RNA hybrid. In embodiments, a polynucleotide donor molecule that is a double-stranded (e. g., a dsDNA or dsDNA/RNA hybrid) molecule is provided directly to the plant protoplast or plant cell in the form of a double-stranded DNA or a double-stranded DNA/RNA hybrid, or as two single-stranded DNA (ssDNA) molecules that are capable of hybridizing to form dsDNA, or as a single-stranded DNA molecule and a single-stranded RNA (ssRNA) molecule that are capable of hybridizing to form a double-stranded DNA/RNA hybrid; that is to say, the double-stranded polynucleotide molecule is not provided indirectly, for example, by expression in the cell of a dsDNA encoded by a plasmid or other vector. In various non-limiting embodiments of the method, the polynucleotide donor molecule that is integrated (or that has a sequence that is integrated) at the site of at least one double-strand break (DSB) in a genome is double-stranded and blunt-ended; in other embodiments the polynucleotide donor molecule is double-stranded and has an overhang or “sticky end” consisting of unpaired nucleotides (e. g., 1, 2, 3, 4, 5, or 6 unpaired nucleotides) at one terminus or both termini. In an embodiment, the DSB in the genome has no unpaired nucleotides at the cleavage site, and the polynucleotide donor molecule that is integrated (or that has a sequence that is integrated) at the site of the DSB is a blunt-ended double-stranded DNA or blunt-ended double-stranded DNA/RNA hybrid molecule, or alternatively is a single-stranded DNA or a single-stranded DNA/RNA hybrid molecule. In another embodiment, the DSB in the genome has one or more unpaired nucleotides at one or both sides of the cleavage site, and the polynucleotide donor molecule that is integrated (or that has a sequence that is integrated) at the site of the DSB is a double-stranded DNA or double-stranded DNA/RNA hybrid molecule with an overhang or “sticky end” consisting of unpaired nucleotides at one or both termini, or alternatively is a single-stranded DNA or a single-stranded DNA/RNA hybrid molecule; in embodiments, the polynucleotide donor molecule DSB is a double-stranded DNA or double-stranded DNA/RNA hybrid molecule that includes an overhang at one or at both termini, wherein the overhang consists of the same number of unpaired nucleotides as the number of unpaired nucleotides created at the site of a DSB by a nuclease that cuts in an off-set fashion (e. g., where a Cpf1 nuclease effects an off-set DSB with 5-nucleotide overhangs in the genomic sequence, the polynucleotide donor molecule that is to be integrated (or that has a sequence that is to be integrated) at the site of the DSB is double-stranded and has 5 unpaired nucleotides at one or both termini). Generally, one or both termini of the polynucleotide donor molecule contain no regions of sequence homology (identity or complementarity) to genomic regions flanking the DSB; that is to say, one or both termini of the polynucleotide donor molecule contain no regions of sequence that is sufficiently complementary to permit hybridization to genomic regions immediately adjacent to the location of the DSB. In embodiments, the polynucleotide donor molecule contains no homology to the locus of the DSB, that is to say, the polynucleotide donor molecule contains no nucleotide sequence that is sufficiently complementary to permit hybridization to genomic regions immediately adjacent to the location of the DSB. In an embodiment, the polynucleotide donor molecule that is integrated at the site of at least one double-strand break (DSB) includes between 2-20 nucleotides in one (if single-stranded) or in both strands (if double-stranded), e. g., 2, 3, 4, 5, 6, 7, 8, 9, 10, 11, 12, 13, 14, 15, 16, 17, 18, 19, or 20 nucleotides on one or on both strands, each of which can be base-paired to a nucleotide on the opposite strand (in the case of a perfectly base-paired double-stranded polynucleotide molecule). In embodiments, the polynucleotide donor molecule is at least partially double-stranded and includes 2-20 base-pairs, e. g., 2, 3, 4, 5, 6, 7, 8, 9, 10, 11, 12, 13, 14, 15, 16, 17, 18, 19, or 20 base-pairs; in embodiments, the polynucleotide donor molecule is double-stranded and blunt-ended and consists of 2-20 base-pairs, e. g., 2, 3, 4, 5, 6, 7, 8, 9, 10, 11, 12, 13, 14, 15, 16, 17, 18, 19, or 20 base-pairs; in other embodiments, the polynucleotide donor molecule is double-stranded and includes 2-20 base-pairs, e. g., 2, 3, 4, 5, 6, 7, 8, 9, 10, 11, 12, 13, 14, 15, 16, 17, 18, 19, or 20 base-pairs and in addition has at least one overhang or “sticky end” consisting of at least one additional, unpaired nucleotide at one or at both termini. Non-limiting examples of such relatively small polynucleotide donor molecules of 20 or fewer base-pairs (if double-stranded) or 20 or fewer nucleotides (if single-stranded) include polynucleotide donor molecules that have at least one strand including a transcription factor recognition site sequence (e. g., such as the sequences of transcription factor recognition sites provided in the working Examples), or that have at least one strand including a small RNA recognition site, or that have at least one strand including a recombinase recognition site. In an embodiment, the polynucleotide donor molecule that is integrated (or that has a sequence that is integrated) at the site of at least one double-strand break (DSB) in a genome is a blunt-ended double-stranded DNA or a blunt-ended double-stranded DNA/RNA hybrid molecule of about 18 to about 300 base-pairs, or about 20 to about 200 base-pairs, or about 30 to about 100 base-pairs, and having at least one phosphorothioate bond between adjacent nucleotides at a 5′ end, 3′ end, or both 5′ and 3′ ends. In embodiments, the polynucleotide donor molecule includes single strands of at least 11, at least 18, at least 20, at least 30, at least 40, at least 60, at least 80, at least 100, at least 120, at least 140, at least 160, at least 180, at least 200, at least 240, at about 280, or at least 320 nucleotides. In embodiments, the polynucleotide donor molecule has a length of at least 2, at least 3, at least 4, at least 5, at least 6, at least 7, at least 8, at least 9, at least 10, or at least 11 base-pairs if double-stranded (or nucleotides if single-stranded), or between about 2 to about 320 base-pairs if double-stranded (or nucleotides if single-stranded), or between about 2 to about 500 base-pairs if double-stranded (or nucleotides if single-stranded), or between about 5 to about 500 base-pairs if double-stranded (or nucleotides if single-stranded), or between about 5 to about 300 base-pairs if double-stranded (or nucleotides if single-stranded), or between about 11 to about 300 base-pairs if double-stranded (or nucleotides if single-stranded), or about 18 to about 300 base-pairs if double-stranded (or nucleotides if single-stranded), or between about 30 to about 100 base-pairs if double-stranded (or nucleotides if single-stranded). In embodiments, the polynucleotide donor molecule includes chemically modified nucleotides (see, e. g., the various modifications of internucleotide linkages, bases, and sugars described in Verma and Eckstein (1998) Annu. Rev. Biochem., 67:99-134); in embodiments, the naturally occurring phosphodiester backbone of the polynucleotide donor molecule is partially or completely modified with phosphorothioate, phosphorodithioate, or methylphosphonate internucleotide linkage modifications, or the polynucleotide donor molecule includes modified nucleoside bases or modified sugars, or the polynucleotide donor molecule is labelled with a fluorescent moiety (e. g., fluorescein or rhodamine or a fluorescent nucleoside analogue) or other detectable label (e. g., biotin or an isotope). In an embodiment, the polynucleotide donor molecule is double-stranded and perfectly base-paired through all or most of its length, with the possible exception of any unpaired nucleotides at either terminus or both termini. In another embodiment, the polynucleotide donor molecule is double-stranded and includes one or more non-terminal mismatches or non-terminal unpaired nucleotides within the otherwise double-stranded duplex. In another embodiment, the polynucleotide donor molecule contains secondary structure that provides stability or acts as an aptamer. Other related embodiments include double-stranded DNA/RNA hybrid molecules, single-stranded DNA/RNA hybrid donor molecules, and single-stranded DNA donor molecules (including single-stranded, chemically modified DNA donor molecules), which in analogous procedures are integrated (or have a sequence that is integrated) at the site of a double-strand break.

[0126] In embodiments of the method, the polynucleotide (such as a double-stranded DNA, a single-stranded DNA, a single-stranded DNA/RNA hybrid, or a double-stranded DNA/RNA hybrid) donor molecule that is integrated at the site of at least one double-strand break (DSB) in a genome includes nucleotide sequence(s) on one or on both strands that provide a desired functionality when the polynucleotide is integrated into the genome. In various non-limiting embodiments of the method, the sequence encoded by a donor polynucleotide that is inserted at the site of at least one double-strand break (DSB) in a genome includes at least one sequence selected from the group consisting of:
[0127] (a) DNA encoding at least one stop codon, or at least one stop codon on each strand, or at least one stop codon within each reading frame on each strand;
[0128] (b) DNA encoding heterologous primer sequence (e. g., a sequence of about 18 to about 22 contiguous nucleotides, or of at least 18 contiguous nucleotides, that can be used to initiate DNA polymerase activity at the site of the DSB);
[0129] (c) DNA encoding a unique identifier sequence (e. g., a sequence that when inserted at the DSB creates a heterologous sequence that can be used to identify the presence of the insertion);
[0130] (d) DNA encoding a transcript-stabilizing sequence;
[0131] (e) DNA encoding a transcript-destabilizing sequence;
[0132] (f) a DNA aptamer or DNA encoding an RNA aptamer or amino acid aptamer; and
[0133] (g) DNA that includes or encodes a sequence recognizable by a specific binding agent.

[0134] In an embodiment, the sequence encoded by the polynucleotide (such as a double-stranded DNA, a single-stranded DNA, a single-stranded DNA/RNA hybrid, or a double-stranded DNA/RNA hybrid) donor molecule that is integrated at the site of at least one double-strand break (DSB) in a genome includes DNA encoding at least one stop codon, or at least one stop codon on each strand, or at least one stop codon within each reading frame on each strand. Such sequence encoded by a polynucleotide donor molecule, when integrated at a DSB in a genome can be useful for disrupting the expression of a sequence of interest, such as a protein-coding gene. An example of such a polynucleotide donor molecule is a double-stranded DNA, a single-stranded DNA, a single-stranded DNA/RNA hybrid, or a double-stranded DNA/RNA hybrid donor molecule, of at least 18 contiguous base-pairs if double-stranded or at least 11 contiguous nucleotides if single-stranded, and encoding at least one stop codon in each possible reading frame on either strand. Another example of such a polynucleotide donor molecule is a double-stranded DNA or double-stranded DNA/RNA hybrid donor molecule wherein each strand includes at least 18 and fewer than 200 contiguous base-pairs, wherein the number of base-pairs is not divisible by 3, and wherein each strand encodes at least one stop codon in each possible reading frame in the 5′ to 3′ direction. Another example of such a polynucleotide donor molecule is a single-stranded DNA or single-stranded DNA/RNA hybrid donor molecule wherein each strand includes at least 11 and fewer than about 300 contiguous nucleotides, wherein the number of base-pairs is not divisible by 3, and wherein the polynucleotide donor molecule encodes at least one stop codon in each possible reading frame in the 5′ to 3′ direction.

[0135] In an embodiment, the polynucleotide (such as a double-stranded DNA, a single-stranded DNA, a single-stranded DNA/RNA hybrid, or a double-stranded DNA/RNA hybrid) donor molecule that is integrated (or that has a sequence that is integrated) at the site of at least one double-strand break (DSB) in a genome includes DNA encoding heterologous primer sequence (e. g., a sequence of about 18 to about 22 contiguous nucleotides, or of at least 18, at least 20, or at least 22 contiguous nucleotides that can be used to initiate DNA polymerase activity at the site of the DSB). Heterologous primer sequence can further include nucleotides of the genomic sequence directly flanking the site of the DSB.

[0136] In an embodiment, the polynucleotide (such as a double-stranded DNA, a single-stranded DNA, a single-stranded DNA/RNA hybrid, or a double-stranded DNA/RNA hybrid) donor molecule that is integrated (or that has a sequence that is integrated) at the site of at least one double-strand break (DSB) in a genome includes nucleotides encoding a unique identifier sequence (e. g., a sequence that when inserted at the DSB creates a heterologous sequence that can be used to identify the presence of the insertion)

[0137] In an embodiment, the polynucleotide (such as a double-stranded DNA, a single-stranded DNA, a single-stranded DNA/RNA hybrid, or a double-stranded DNA/RNA hybrid) donor molecule that is integrated (or that has a sequence that is integrated) at the site of at least one double-strand break (DSB) in a genome includes nucleotides encoding a transcript-stabilizing sequence. In an example, sequence of a double-stranded or single-stranded DNA or a DNA/RNA hybrid donor molecule encoding a 5′ terminal RNA-stabilizing stem-loop (see, e. g., Suay (2005) Nucleic Acids Rev., 33:4754-4761) is integrated at a DSB located 5′ to the sequence for which improved transcript stability is desired. In another embodiment, the polynucleotide donor molecule that is integrated (or that has a sequence that is integrated) at the site of at least one double-strand break (DSB) in a genome includes nucleotides encoding a transcript-destabilizing sequence such as the SAUR destabilizing sequences described in detail in U. S. Patent Application Publication 2007/0011761, incorporated herein by reference.

[0138] In an embodiment, the polynucleotide (such as a double-stranded DNA, a single-stranded DNA, a single-stranded DNA/RNA hybrid, or a double-stranded DNA/RNA hybrid) donor molecule that is integrated (or that has a sequence that is integrated) at the site of at least one double-strand break (DSB) in a genome includes a DNA aptamer or DNA encoding an RNA aptamer or amino acid aptamer. Nucleic acid (DNA or RNA) aptamers are single- or double-stranded nucleotides that bind specifically to molecules or ligands which include small molecules (e. g., secondary metabolites such as alkaloids, terpenes, flavonoids, and other small molecules, as well as larger molecules such as polyketides and non-ribosomal proteins), proteins, other nucleic acid molecules, and inorganic compounds. Introducing an aptamer at a specific location in the genome is useful, e. g., for adding binding specificity to an enzyme or for placing expression of a transcript or activity of an encoded protein under ligand-specific control. In an example, the polynucleotide donor molecule encodes a poly-histidine “tag” which is integrated at a DSB downstream of a protein or protein subunit, enabling the protein expressed from the resulting transcript to be purified by affinity to nickel, e. g., on nickel resins; in an embodiments, the polynucleotide donor molecule encodes a 6×-His tag, a 10×-His tag, or a 10×-His tag including one or more stop codons following the histidine-encoding codons, where the last is particularly useful when integrated downstream of a protein or protein subunit lacking a stop codon (see, e. g., parts[dot]igem[dot]org/Part:BBa_K844000). In embodiments, the polynucleotide donor molecule encodes a riboswitch, wherein the riboswitch includes both an aptamer which changes its conformation in the presence or absence of a specific ligand, and an expression-controlling region that turns expression on or off, depending on the conformation of the aptamer. See, for example, the regulatory RNA molecules containing ligand-specific aptamers described in U. S. Patent Application Publication 2013/0102651 and the various riboswitches described in U. S. Patent Application Publication 2005/0053951, both of which publications are incorporated herein by reference.

[0139] In an embodiment, the polynucleotide (such as a double-stranded DNA, a single-stranded DNA, a single-stranded DNA/RNA hybrid, or a double-stranded DNA/RNA hybrid) donor molecule that is integrated (or that has a sequence that is integrated) at the site of at least one double-strand break (DSB) in a genome includes nucleotides that include or encode a sequence recognizable by (i. e., binds to) a specific binding agent. Non-limiting embodiments of specific binding agents include nucleic acids, peptides or proteins, non-peptide/non-nucleic acid ligands, inorganic molecules, and combinations thereof; specific binding agents also include macromolecular assemblages such as lipid bilayers, cell components or organelles, and even intact cells or organisms. In embodiments, the specific binding agent is an aptamer or riboswitch, or alternatively is recognized by an aptamer or a riboswitch. In an embodiment, the disclosure provides a method of changing expression of a sequence of interest in a genome, comprising integrating a polynucleotide molecule at the site of a DSB in a genome, wherein the polynucleotide donor molecule includes a sequence recognizable by a specific binding agent, wherein the integrated sequence encoded by the polynucleotide donor molecule is functionally or operably linked to a sequence of interest, and wherein contacting the integrated sequence encoded by the polynucleotide donor molecule with the specific binding agent results in a change of expression of the sequence of interest; in embodiments, sequences encoded by different polynucleotide donor molecules are integrated at multiple DSBs in a genome.

[0140] In an embodiment, the polynucleotide (such as a double-stranded DNA, a single-stranded DNA, a single-stranded DNA/RNA hybrid, or a double-stranded DNA/RNA hybrid) donor molecule that is integrated (or that has a sequence that is integrated) at the site of at least one double-strand break (DSB) in a genome includes nucleotides that include or encode a sequence recognizable by (i. e., binds to) a specific binding agent, wherein:
[0141] (a) the sequence recognizable by a specific binding agent includes an auxin response element (AuxRE) sequence, the specific binding agent is an auxin, and the change of expression is upregulation; see, e. g., Walker and Estelle (1998) Curr. Opinion Plant Biol., 1:434-439;
[0142] (b) the sequence recognizable by a specific binding agent includes at least one D1-4 sequence (CCTCGTGTCTC, SEQ ID NO:328; see Ulmasov et al. (1997) Plant Cell, 9:1963-1971), the specific binding agent is an auxin, and the change of expression is upregulation;
[0143] (c) the sequence recognizable by a specific binding agent includes at least one DR5 sequence (CCTTTTGTCTC, SEQ ID NO:329; see Ulmasov et al. (1997) Plant Cell, 9:1963-1971), the specific binding agent is an auxin, and the change of expression is upregulation;
[0144] (d) the sequence recognizable by a specific binding agent includes at least one m5-DR5 sequence (CCTTTTGTCNC, wherein N is A, C, or G. SEQ ID NO:330; see Ulmasov et al. (1997) Plant Cell, 9:1963-1971), the specific binding agent is an auxin, and the change of expression is upregulation;
[0145] (e) the sequence recognizable by a specific binding agent includes at least one P3 sequence (TGTCTC, SEQ ID NO:331), the specific binding agent is an auxin, and the change of expression is upregulation;
[0146] (f) the sequence recognizable by a specific binding agent includes a small RNA recognition site sequence, the specific binding agent is the corresponding small RNA (e. g., an siRNA, a microRNA (miRNA), a trans-acting siRNA as described in U.S. Pat. No. 8,030,473, or a phased sRNA as described in U.S. Pat. No. 8,404,928; both of these cited patents are incorporated by reference herein), and the change of expression is downregulation (non-limiting examples are given below, under the heading “Small RNAs”);
[0147] (g) the sequence recognizable by a specific binding agent includes a microRNA (miRNA) recognition site sequence, the specific binding agent is the corresponding mature miRNA, and the change of expression is downregulation (non-limiting examples are given below, under the heading “Small RNAs”);
[0148] (h) the sequence recognizable by a specific binding agent includes a microRNA (miRNA) recognition sequence for an engineered miRNA, the specific binding agent is the corresponding engineered mature miRNA, and the change of expression is downregulation;
[0149] (i) the sequence recognizable by a specific binding agent includes a transposon recognition sequence, the specific binding agent is the corresponding transposon, and the change of expression is upregulation or downregulation;
[0150] (j) the sequence recognizable by a specific binding agent includes an ethylene-responsive element binding-factor-associated amphiphilic repression (EAR) motif (LxLxL, SEQ ID NO:332 or DLNxxP, SEQ ID NO:333) sequence (see, e. g., Ragale and Rozwadowski (2011) Epigenetics, 6:141-146), the specific binding agent is ERF (ethylene-responsive element binding factor) or co-repressor (e. g., TOPLESS (TPL)), and the change of expression is downregulation;
[0151] (k) the sequence recognizable by a specific binding agent includes a splice site sequence (e. g., a donor site, a branching site, or an acceptor site; see, for example, the splice sites and splicing signals publicly available at the ERIS database, lemur[dot]amu[dot]edu[dot]pl/share/ERISdb/home.html), the specific binding agent is a spliceosome, and the change of expression is expression of an alternatively spliced transcript (in some cases, this can include deletion of a relatively large genomic sequence, such as deletion of all or part of an exon or of a protein domain);
[0152] (l) the sequence recognizable by a specific binding agent includes a recombinase recognition site sequence that is recognized by a site-specific recombinase, the specific binding agent is the corresponding site-specific recombinase, and the change of expression is upregulation or downregulation or expression of a transcript having an altered sequence (for example, expression of a transcript that has had a region of DNA excised by the recombinase) (non-limiting examples are given below, under the heading “Recombinases and Recombinase Recognition Sites”);
[0153] (m) the sequence recognizable by a specific binding agent includes sequence encoding an RNA or amino acid aptamer or an RNA riboswitch, the specific binding agent is the corresponding ligand, and the change in expression is upregulation or downregulation;
[0154] (n) the sequence recognizable by a specific binding agent is a hormone responsive element (e. g., a nuclear receptor, or a hormone-binding domain thereof), the specific binding agent is a hormone, and the change in expression is upregulation or downregulation; or
[0155] (o) the sequence recognizable by a specific binding agent is a transcription factor binding sequence, the specific binding agent is the corresponding transcription factor, and the change in expression is upregulation or downregulation (non-limiting examples are given below, under the heading “Transcription Factors”).

[0156] In embodiments, the polynucleotide (such as a double-stranded DNA, a single-stranded DNA, a single-stranded DNA/RNA hybrid, or a double-stranded DNA/RNA hybrid) donor molecule that is integrated (or that has a sequence that is integrated) at the site of at least one double-strand break (DSB) in a genome includes a nucleotide sequence that encodes an RNA molecule or an amino acid sequence that is recognizable by a specific binding agent. In embodiments, the polynucleotide donor molecule includes a nucleotide sequence that binds specifically to a ligand or that encodes an RNA molecule or an amino acid sequence that binds specifically to a ligand. In embodiments, the polynucleotide donor molecule encodes at least one stop codon on each strand, or encodes at least one stop codon within each reading frame on each strand.

[0157] In embodiments, the polynucleotide (such as a double-stranded DNA, a single-stranded DNA, a single-stranded DNA/RNA hybrid, or a double-stranded DNA/RNA hybrid) donor molecule includes at least partially self-complementary sequence, such that the polynucleotide donor molecule encodes a transcript that is capable of forming at least partially double-stranded RNA. In embodiments, the at least partially double-stranded RNA is capable of forming secondary structure containing at least one stem-loop (i. e., a substantially or perfectly double-stranded RNA “stem” region and a single-stranded RNA “loop” connecting opposite strands of the dsRNA stem. In embodiments, the at least partially double-stranded RNA is cleavable by a Dicer or other ribonuclease. In embodiments, the at least partially double-stranded RNA includes an aptamer or a riboswitch; see, e. g., the RNA aptamers described in U. S. Patent Application Publication 2013/0102651, which is incorporated herein by reference.

[0158] In embodiments, the polynucleotide (such as a double-stranded DNA, a single-stranded DNA, a single-stranded DNA/RNA hybrid, or a double-stranded DNA/RNA hybrid) donor molecule that is integrated (or that has a sequence that is integrated) at the site of at least one double-strand break (DSB) in a genome includes or encodes a nucleotide sequence that is responsive to a specific change in the physical environment (e. g., a change in light intensity or quality, a change in temperature, a change in pressure, a change in osmotic concentration, a change in day length, or addition or removal of a ligand or specific binding agent), wherein exposing the integrated polynucleotide sequence to the specific change in the physical environment results in a change of expression of the sequence of interest. In embodiments, the polynucleotide donor molecule includes a nucleotide sequence encoding an RNA molecule or an amino acid sequence that is responsive to a specific change in the physical environment. In a non-limiting example, the polynucleotide donor molecule encodes an amino acid sequence that is responsive to light, oxygen, redox status, or voltage, such as a Light-Oxygen-Voltage (LOV) domain (see, e. g., Peter et al. (2010) Nature Communications, doi:10.1038/ncomms1121) or a PAS domain (see, e. g., Taylor and Zhulin (1999) Microbiol. Mol. Biol. Reviews, 63:479-506), proteins containing such domains, or sub-domains or motifs thereof (see, e. g., the photochemically active 36-residue N-terminal truncation of the VVD protein described by Zoltowski et al. (2007) Science, 316:1054-1057). In a non-limiting embodiment, integration of a LOV domain at the site of a DSB within or adjacent to a protein-coding region is used to create a heterologous fusion protein that can be photo-activated.

[0159] Small RNAs: In an embodiment, the polynucleotide (such as a double-stranded DNA, a single-stranded DNA, a single-stranded DNA/RNA hybrid, or a double-stranded DNA/RNA hybrid) donor molecule that is integrated (or that has a sequence that is integrated) at the site of at least one double-strand break (DSB) in a genome includes DNA that includes or encodes a small RNA recognition site sequence that is recognized by a corresponding mature small RNA. Small RNAs include siRNAs, microRNAs (miRNAs), trans-acting siRNAs (ta-siRNAs) as described in U.S. Pat. No. 8,030,473, and phased small RNAs (phased sRNAs) as described in U.S. Pat. No. 8,404,928. All mature small RNAs are single-stranded RNA molecules, generally between about 18 to about 26 nucleotides in length, which are produced from longer, completely or substantially double-stranded RNA (dsRNA) precursors. For example, siRNAs are generally processed from perfectly or near-perfectly double-stranded RNA precursors, whereas both miRNAs and phased sRNAs are processed from larger precursors that contain at least some mismatched (non-base-paired) nucleotides and often substantial secondary structure such as loops and bulges in the otherwise largely double-stranded RNA precursor. Precursor molecules include naturally occurring precursors, which are often expressed in a specific (e. g., cell- or tissue-specific, temporally specific, developmentally specific, or inducible) expression pattern. Precursor molecules also include engineered precursor molecules, designed to produce small RNAs (e. g., artificial or engineered siRNAs or miRNAs) that target specific sequences; see, e. g., U.S. Pat. Nos. 7,691,995 and 7,786,350, which are incorporated herein by reference in their entirety. Thus, in embodiments, the polynucleotide (such as a double-stranded DNA, a single-stranded DNA, a single-stranded DNA/RNA hybrid, or a double-stranded DNA/RNA hybrid) donor molecule that is integrated (or that has a sequence that is integrated) at the site of at least one double-strand break (DSB) in a genome includes DNA that includes or encodes a small RNA precursor sequence designed to be processed in vivo to at least one corresponding mature small RNA. In embodiments, the polynucleotide donor molecule that is integrated (or that has a sequence that is integrated) at the site of at least one double-strand break (DSB) in a genome includes DNA that includes or encodes an engineered small RNA precursor sequence that is based on a naturally occurring “scaffold” precursor sequence but wherein the nucleotides of the encoded mature small RNA are designed to target a specific gene of interest that is different from the gene targeted by the natively encoded small RNA; in embodiments, the “scaffold” precursor sequence is one identified from the genome of a plant or a pest or pathogen of a plant; see, e. g., U.S. Pat. No. 8,410,334, which discloses transgenic expression of engineered invertebrate miRNA precursors in a plant, and which is incorporated herein by reference in its entirety.

[0160] Regardless of the pathway that generates the mature small RNA, the mechanism of action is generally similar; the mature small RNA binds in a sequence-specific manner to a small RNA recognition site located on an RNA molecule (such as a transcript or messenger RNA), and the resulting duplex is cleaved by a ribonuclease. The integration of a recognition site for a small RNA at the site of a DSB results in cleavage of the transcript including the integrated recognition site when and where the mature small RNA is expressed and available to bind to the recognition site. For example, a recognition site sequence for a mature siRNA or miRNA that is endogenously expressed only in male reproductive tissue of a plant can be integrated into a DSB, whereby a transcript containing the recognition site sequence is cleaved only where the mature siRNA or miRNA is expressed (i. e., in male reproductive tissue); this is useful, e. g., to prevent expression of a protein in male reproductive tissue such as pollen, and can be used in applications such as to induce male sterility in a plant or to prevent pollen development or shedding. Similarly, a recognition site sequence for a mature siRNA or miRNA that is endogenously expressed only in the roots of a plant can be integrated into a DSB, whereby a transcript containing the recognition site sequence is cleaved only in roots; this is useful, e. g., to prevent expression of a protein in roots. Non-limiting examples of useful small RNAs include: miRNAs having tissue-specific expression patterns disclosed in U.S. Pat. No. 8,334,430, miRNAs having temporally specific expression patterns disclosed in U.S. Pat. No. 8,314,290, miRNAs with stress-responsive expression patterns disclosed in U.S. Pat. No. 8,237,017, siRNAs having tissue-specific expression patterns disclosed in U.S. Pat. No. 9,139,838, and various miRNA recognition site sequences and the corresponding miRNAs disclosed in U. S. Patent Application Publication 2009/0293148. All of the patent publications referenced in this paragraph are incorporated herein by reference in their entirety. In embodiments, multiple edits in a genome are employed to obtain a desired phenotype or trait in plant. In an embodiment, one or more edits (addition, deletion, or substitution of one or more nucleotides) of an endogenous nucleotide sequence is made to provide a general phenotype; addition of at least one small RNA recognition site by insertion of the recognition site sequence at a DSB that is functionally linked to the edited endogenous nucleotide sequence achieves more specific control of expression of the edited endogenous nucleotide sequence. In an example, an endogenous plant 5-enolpyruvylshikimate-3-phosphate synthase (EPSPS) is edited to provide a glyphosate-resistant EPSPS; for example, suitable changes include the amino acid substitutions Threonine-102-Isoleucine (T102I) and Proline-106-Serine (P106S) in the maize EPSPS sequence identified by Genbank accession number X63374 (see, for example U.S. Pat. No. 6,762,344, incorporated herein by reference). In another example, an endogenous plant acetolactate synthase (ALS) is edited to increase resistance of the enzyme to various herbicides (e. g., sulfonylurea, imidazolinone, tirazolopyrimidine, pyrimidinylthiobenzoate, sulfonylamino-carbonyltriazolinone); for example, suitable changes include the amino acid substitutions G115, A 116, P191, A199, K250, M345, D370, V565, W568, and F572 to the Nicotiana tabacum ALS enzyme as described in U.S. Pat. No. 5,605,011, which is incorporated herein by reference. The edited herbicide-tolerant enzyme, combined with integration of at least one small RNA recognition site for a small RNA (e. g., an siRNA or a miRNA) expressed only in a specific tissue (for example, miRNAs specifically expressed in male reproductive tissue or female reproductive tissue, e. g., the miRNAs disclosed in Table 6 of U.S. Pat. No. 8,334,430 or the siRNAs disclosed in U.S. Pat. No. 9,139,838, both incorporated herein by reference) at a DSB functionally linked to (e. g., in the 3′ untranslated region of) the edited herbicide-tolerant enzyme results in expression of the edited herbicide-tolerant enzyme being restricted to tissues other than those in which the small RNA is endogenously expressed, and those tissues in which the small RNA is expressed will not be resistant to herbicide application; this approach is useful, e. g., to provide male-sterile or female-sterile plants.

[0161] In other embodiments, the sequence of an endogenous genomic locus encoding one or more small RNAs (e. g., miRNAs, siRNAs, ta-siRNAs) is altered in order to express a small RNA having a sequence that is different from that of the endogenous small RNA and is designed to target a new sequence of interest (e. g., a sequence of a plant pest, plant pathogen, symbiont of a plant, or symbiont of a plant pest or pathogen). For example, the sequence of an endogenous or native genomic locus encoding a miRNA precursor can be altered in the mature miRNA and the miR* sequences, while maintaining the secondary structure in the resulting altered miRNA precursor sequence to permit normal processing of the transcript to a mature miRNA with a different sequence from the original, native mature miRNA sequence; see, for example, U.S. Pat. Nos. 7,786,350 and 8,395,023, both of which are incorporated by reference in their entirety herein, and which teach methods of designing engineered miRNAs. In embodiments, the sequence of an endogenous genomic locus encoding one or more small RNAs (e. g., miRNAs, siRNAs, ta-siRNAs) is altered in order to express one or more small RNA cleavage blockers (see, e. g., U.S. Pat. No. 9,040,774, which is incorporated by reference in its entirety herein). In embodiments, the sequence of an endogenous genomic locus is altered to encode a small RNA decoy (e. g., U.S. Pat. No. 8,946,511, which is incorporated by reference in its entirety herein). In embodiments, the sequence of an endogenous genomic locus that natively contains a small RNA (e. g., miRNA, siRNA, or ta-siRNA) recognition or cleavage site is altered to delete or otherwise mutate the recognition or cleavage site and thus decouple the genomic locus from small RNA regulation.

[0162] Recombinases and Recombinase Recognition Sites: In an embodiment, the polynucleotide (such as a double-stranded DNA, a single-stranded DNA, a single-stranded DNA/RNA hybrid, or a double-stranded DNA/RNA hybrid) donor molecule that is integrated (or that has a sequence that is integrated) at the site of at least one double-strand break (DSB) in a genome includes DNA that includes or encodes a recombinase recognition site sequence that is recognized by a site-specific recombinase, the specific binding agent is the corresponding site-specific recombinase, and the change of expression is upregulation or downregulation or expression of a transcript having an altered sequence (for example, expression of a transcript that has had a region of DNA excised by the recombinase). The term “recombinase recognition site sequence” refers to the DNA sequences (usually a pair of sequences) that are recognized by a site-specific (i. e., sequence-specific) recombinase in a process that allows the excision (or, in some cases, inversion or translocation) of the DNA located between the sequence-specific recombination sites. For instance, Cre recombinase recognizes either loxP recombination sites or lox511 recombination sites which are heterospecific, which means that loxP and lox511 do not recombine together (see, e. g., Odell et al. (1994) Plant Physiol., 106:447-458); FLP recombinase recognizes fit recombination sites (see, e. g., Lyznik et al. (1996) Nucleic Acids Res., 24:3784-3789); R recombinase recognizes Rs recombination sites (see, e. g., Onounchi et a. (1991) Nucleic Acids Res., 19:6373-6378); Dre recombinase recognizes rox sites (see, e. g., U.S. Pat. No. 7,422,889, incorporated herein by reference); and Gin recombinase recognizes gix sites (see, e. g., Maeser et al. (1991) Mol. Gen. Genet., 230:170-176). In a non-limiting example, a pair of polynucleotides encoding loxP recombinase recognition site sequences encoded by a pair of polynucleotide donor molecules are integrated at two separate DSBs; in the presence of the corresponding site-specific DNA recombinase Cre, the genomic sequence flanked on either side by the integrated loxP recognition sites is excised from the genome (for loxP sequences that are integrated in the same orientation relative to each other within the genome) or is inverted (for loxP sites that are integrated in an inverted orientation relative to each other within the genome) or is translocated (for loxP sites that are integrated on separate DNA molecules); such an approach is useful, e. g., for deletion or replacement of larger lengths of genomic sequence, for example, deletion or replacement of one or more protein domains. In embodiments, the recombinase recognition site sequences that are integrated at two separate DSBs are heterospecific, i. e., will not recombine together, for example, Cre recombinase recognizes either loxP recombination sites or lox511 recombination sites which are heterospecific relative to each other, which means that a loxP site and a lox511 site will not recombine together but only with another recombination site of its own type.

[0163] Integration of recombinase recognition sites is useful in plant breeding; in an embodiment, the method is used to provide a first parent plant having recombinase recognition site sequences heterologously integrated at two separate DSBs; crossing this first parent plant to a second parent plant that expresses the corresponding recombinase results in progeny plants in which the genomic sequence flanked on either side by the heterologously integrated recognition sites is excised from (or in some cases, inverted in) the genome. This approach is useful, e. g., for deletion of relatively large regions of DNA from a genome, for example, for excising DNA encoding a selectable or screenable marker that was introduced using transgenic techniques. Examples of heterologous arrangements or integration patterns of recombinase recognition sites and methods for their use, particularly in plant breeding, are disclosed in U.S. Pat. No. 8,816,153 (see, for example, the Figures and working examples), the entire specification of which is incorporated herein by reference.

[0164] Transcription Factors: In an embodiment, the sequence encoded by the donor polynucleotide (such as a double-stranded DNA, a single-stranded DNA, a single-stranded DNA/RNA hybrid, or a double-stranded DNA/RNA hybrid) donor molecule that is integrated (or that has a sequence that is integrated) at the site of at least one double-strand break (DSB) in a genome includes a transcription factor binding sequence, the specific binding agent is the corresponding transcription factor (or more specifically, the DNA-binding domain of the corresponding transcription factor), and the change in expression is upregulation or downregulation (depending on the type of transcription factor involved). In an embodiment, the transcription factor is an activating transcription factor or activator, and the change in expression is upregulation or increased expression increased expression (e.g., increased expression of at least 10%, 15%, 20%, 25%, 30%, 35%, 40%, 50%, 60%, 70%, 80%, 90%, 95%, 100% or greater, e.g., at least a 2-fold, 5-fold, 10-fold, 20-fold, 30-fold, 40-fold, 50-fold change, 100-fold or even 1000-fold change or greater) of a sequence of interest to which the transcription factor binding sequence, when integrated at a DSB in the genome, is operably linked. In some embodiments, expression is increased between 10-100%; between 2-fold and 5-fold; between 2 and 10-fold; between 10-fold and 50-fold; between 10-fold and a 100-fold; between 100-fold and 1000-fold; between 1000-fold and 5,000-fold; between 5,000-fold and 10,000 fold. In some embodiments, a targeted insertion may decrease expression by at least 1%, 5%, 10%, 15%, 20%, 25%, 30%, 35%, 40%, 50%, 60%, 70%, 80%, 90%, 95%, 99% or more. In another embodiment, the transcription factor is a repressing transcription factor or repressor, and the change in expression is downregulation or decreased expression (e.g., decreased expression by at least 1%, 5%, 10%, 15%, 20%, 25%, 30%, 35%, 40%, 50%, 60%, 70%, 80%, 90%, 95%, 99% or more) of a sequence of interest to which the transcription factor binding sequence when integrated at a DSB in the genome, is operably linked. Embodiments of transcription factors include hormone receptors, e. g., nuclear receptors, which include both a hormone-binding domain and a DNA-binding domain; in embodiments, the polynucleotide donor molecule that is integrated (or that has a sequence that is integrated) at the site of at least one double-strand break (DSB) in a genome includes or encodes a hormone-binding domain of a nuclear receptor or a DNA-binding domain of a nuclear receptor. Various non-limiting examples of transcription factor binding sequences and transcription factors are provided in the working Examples. In embodiments, the sequence recognizable by a specific binding agent is a transcription factor binding sequence selected from those publicly disclosed at arabidopsis[dot]med[dot]ohio-state[dot]edu/AtcisDB/bindingsites[dot]html and neomorph[dot]salk[dot]edu/dap_web/pages/index[dot]php.

[0165] To summarize, the methods described herein permit sequences encoded by donor polynucleotides to be inserted, in a non-multiplexed or multiplexed manner, into a plant cell genome for the purpose of modulating gene expression in a number of distinct ways. Gene expression can be modulated up or down, for example, by tuning expression through the insertion of enhancer elements and transcription start sequences (e.g., nitrate response elements and auxin binding elements). Conditional transcription factor binding sites can be added or modified to allow additional control. Similarly, transcript stabilizing and/or destabilizing sequences can be inserted using the methods herein. Via the targeted insertion of stop codons, RNAi cleavage sites, or sites for recombinases, the methods described herein allow the transcription of particular sequences to be selectively turned off (likewise, the targeted removal of such sequences can be used to turn gene transcription on).

[0166] The plant genome targeting methods disclosed herein also enable transcription rates to be adjusted by the modification (optimization or de-optimization) of core promoter sequences (e.g., TATAA boxes). Proximal control elements (e.g., GC boxes; CAAT boxes) can likewise be modified. Enhancer or repressor motifs can be inserted or modified. Three-dimensional structural barriers in DNA that inhibit RNA polymerase can be created or removed via the targeted insertion of sequences, or by the modification of existing sequences. Where intron mediated enhancement is known to affect transcript rate, the relevant rate-affecting sequences can be optimized or deoptimized (by insertion of additional sequences or modification of existing sequences) to further enhance or diminish transcription. Through the insertion or modification of sequences using the targeting methods described herein (including multiplexed targeting methods), mRNA stability and processing can be modulated (thereby modulating gene expression). For example, mRNA stabilizing or destabilizing motifs can be inserted, removed or modified; mRNA splicing donor/acceptor sites can be inserted, removed or modified and, in some instance, create the possibility of increased control over alternate splicing. Similarly, miRNA binding sites can be added, removed or modified using the methods described herein. Epigenetic regulation of transcription can also be adjusted according to the methods described herein (e.g., by increasing or decreasing the degree of methylation of DNA, or the degree of methylation or acetylation of histones). Epigenetic regulation using the tools and methods described herein can be combined with other methods for modifying genetic sequences described herein, for the purpose of modifying a trait of a plant cell or plant, or for creating populations of modified cells and cells from which desired phenotypes can be selected.

[0167] The plant genome targeting methods described herein can also be used to modulate translation efficiency by, e.g., modifying codon usage towards or away from a particular plant cell's bias. Similarly, through the use of the targeting methods described herein, KOZAK sequences can be optimized or deoptimized, mRNA folding and structures affecting initiation of translation can be altered, and upstream reading frames can be created or destroyed. Through alteration of coding sequences using the targeted genome modification methods described herein, the abundance and/or activity of translated proteins can be adjusted. For example, the amino acid sequences in active sites or functional sites of proteins can be modified to increase or decrease the activity of the protein as desired; in addition, or alternatively, protein stabilizing or destabilizing motifs can be added or modified. All of the gene expression and activity modification schemes described herein can be utilized in various combinations to fine-tune gene expression and activity. Using the multiplexed targeting methods described herein, a plurality of specific targeted modifications can be achieved in a plant cell without intervening selection or sequencing steps.

### Modified Plant Cells Comprising Specifically Targeted and Modified Genomes

[0168] Another aspect of the disclosure includes the cell, such as a plant cell, provided by the methods disclosed herein. In an embodiment, a plant cell thus provided includes in its genome a heterologous DNA sequence that includes: (a) nucleotide sequence of a polynucleotide (such as a double-stranded DNA, a single-stranded DNA, a single-stranded DNA/RNA hybrid, or a double-stranded DNA/RNA hybrid) molecule integrated at the site of a DSB in a genome; and (b) genomic nucleotide sequence adjacent to the site of the DSB. In embodiments, the methods disclosed herein for integrating a sequence encoded by a polynucleotide donor molecule into the site of a DSB are applied to a plant cell (e. g., a plant cell or plant protoplast isolated from a whole plant or plant part or plant tissue, or an isolated plant cell or plant protoplast in suspension or plate culture); in other embodiments, the methods are applied to non-isolated plant cells in situ or in planta, such as a plant cell located in an intact or growing plant or in a plant part or tissue. The methods disclosed herein for integrating a sequence encoded by a polynucleotide donor molecule into the site of a DSB are also useful in introducing heterologous sequence at the site of a DSB induced in the genome of other photosynthetic eukaryotes (e. g., green algae, red algae, diatoms, brown algae, and dinoflagellates). In embodiments, the plant cell or plant protoplast is capable of division and further differentiation. In embodiments, the plant cell or plant protoplast is obtained or isolated from a plant or part of a plant selected from the group consisting of a plant tissue, a whole plant, an intact nodal bud, a shoot apex or shoot apical meristem, a root apex or root apical meristem, lateral meristem, intercalary meristem, a seedling (e. g., a germinating seed or small seedling or a larger seedling with one or more true leaves), a whole seed (e. g., an intact seed, or a seed with part or all of its seed coat removed or treated to make permeable), a halved seed or other seed fragment, a zygotic or somatic embryo (e. g., a mature dissected zygotic embryo, a developing zygotic or somatic embryo, a dry or rehydrated or freshly excised zygotic embryo), pollen, microspores, epidermis, flower, and callus.

[0169] In some embodiments, the method includes the additional step of growing or regenerating a plant from a plant cell containing the heterologous DNA sequence of the polynucleotide donor molecule integrated at the site of a DSB and genomic nucleotide sequence adjacent to the site of the DSB, wherein the plant includes at least some cells that contain the heterologous DNA sequence of the polynucleotide donor molecule integrated at the site of a DSB and genomic nucleotide sequence adjacent to the site of the DSB. In embodiments, callus is produced from the plant cell, and plantlets and plants produced from such callus. In other embodiments, whole seedlings or plants are grown directly from the plant cell without a callus stage. Thus, additional related aspects are directed to whole seedlings and plants grown or regenerated from the plant cell or plant protoplast containing sequence encoded by a polynucleotide (such as a double-stranded DNA, a single-stranded DNA, a single-stranded DNA/RNA hybrid, or a double-stranded DNA/RNA hybrid) donor molecule heterologously integrated at the site of a DSB, as well as the seeds of such plants; embodiments include whole seedlings and plants grown or regenerated from the plant cell or plant protoplast containing sequence encoded by a polynucleotide donor molecule heterologously integrated at the site of two or more DSBs, as well as the seeds of such plants. In embodiments, the grown or regenerated plant exhibits a phenotype associated with the sequence encoded by a polynucleotide donor molecule heterologously integrated at the site of a DSB. In embodiments, the grown or regenerated plant includes in its genome two or more genetic modifications that in combination provide at least one phenotype of interest, wherein at least one of the two or more genetic modifications includes the sequence encoded by a polynucleotide donor molecule heterologously integrated at the site of a DSB in the genome, or wherein the two or more genetic modifications include sequence encoded by at least one polynucleotide donor heterologously integrated at two or more DSBs in the genome, or wherein the two or more genetic modifications include sequences encoded by multiple polynucleotides donor molecules heterologously integrated at different DSBs in the genome. In embodiments, a heterogeneous population of plant cells or plant protoplasts, at least some of which include sequence encoded by at least one polynucleotide donor molecule heterologously integrated at the site of a DSB, is provided by the method, related aspects include a plant having a phenotype of interest associated with sequence encoded by the polynucleotide donor molecule heterologously integrated at the site of a DSB, provided by either regeneration of a plant having the phenotype of interest from a plant cell or plant protoplast selected from the heterogeneous population of plant cells or plant protoplasts, or by selection of a plant having the phenotype of interest from a heterogeneous population of plants grown or regenerated from the population of plant cells or plant protoplasts. Examples of phenotypes of interest include (but are not limited to) herbicide resistance; improved tolerance of abiotic stress (e. g., tolerance of temperature extremes, drought, or salt) or biotic stress (e. g., resistance to bacterial or fungal pathogens); improved utilization of nutrients or water; synthesis of new or modified amounts of lipids, carbohydrates, proteins or other chemicals, including medicinal compounds; improved flavour or appearance; improved photosynthesis; improved storage characteristics (e. g., resistance to bruising, browning, or softening); increased yield; altered morphology (e. g., floral architecture or colour, plant height, branching, root structure); and changes in flowering time. In an embodiment, a heterogeneous population of plant cells or plant protoplasts (or seedlings or plants grown or regenerated therefrom) is exposed to conditions permitting expression of the phenotype of interest; e. g., selection for herbicide resistance can include exposing the population of plant cells or plant protoplasts (or seedlings or plants) to an amount of herbicide or other substance that inhibits growth or is toxic, allowing identification and selection of those resistant plant cells or plant protoplasts (or seedlings or plants) that survive treatment. In certain embodiments, a proxy measurement can be taken of an aspect of a modified plant or plant cell, where the measurement is indicative of a desired phenotype or trait. For example, the modification of one or more targeted sequences in a genome may provide a measurable change in a molecule (e.g., a detectable change in the structure of a molecule, or a change in the amount of the molecule that is detected, or the presence or absence of a molecule) that can be used as a biomarker for a presence of a desired phenotype or trait. The proper insertion of an enhancer for increasing expression of an enzyme, for example, may be determined by detecting lower levels of the enzyme's substrate.

[0170] In embodiments provided herein where expression of the endogenous soybean GmDR1 gene is increased, one or more biotic stress resistance phenotypes can be achieved in the modified soybean plants provided herein. Such biotic stress resistance phenotypes include resistance to various pests and/or pathogens of soybean relative to reference or other control plants lacking the GmDR1 gene modification. Examples of pathogen resistance phenotypes provided in the modified soybean plants comprising the GmDR1 gene modifications include resistance to one or more fungal pathogens of soybean including Fusarium sp. (e.g., F. sojae, F. virguliformae, F. solani, F. semitectum), Macrophomina sp. (e.g., M. phaseolina), Rhizoctonia sp. (e.g., R. solani), Sclerotinia sp. (e.g., S. sclerotiorum), Diaporthe sp. (e.g., D. phaseolorum var. sojae (e.g., Phomopsis sojae), D. phaseolorum var. caulivora), Sclerotium sp. (e.g., S. rolfsii), Cercospora sp. (e.g., C. kikuchii, C. sojina), Peronospora sp. (e.g., P. manshurica), Colletotrichum sp. (e.g., C. dematium (Colletotrichum truncatum)), Corynespora sp. (e.g., C. cassicola), Septoria sp. (e.g., S. glycines), Phyllosticta sp. (e.g., P. sojicola), Alternaria sp. (e.g., A. alternata), Pseudomonas sp. (e.g., P. syringae p.v. glycinea), Xanthomonas sp. (e.g., X. campestris p. v. phaseoli), Microsphaera sp. (e.g., M. diffusa), Phialophora sp. (e.g., P. gregata), Glomerella glycines, Phakopsora sp. (e.g., P. pachyrhizi, P. meibomiae), Pythium sp. (e.g., P. aphanidermatum, P. ultimum, P. debaryanum), Soybean mosaic virus, Tobacco Ring spot virus, Tobacco Streak virus, and Tomato spotted wilt virus. Examples of pest resistance phenotypes provided in the modified soybean plants comprising the GmDR1 gene modifications include resistance to one or more pests of soybean including Heterodera sp. (e.g., H. glycines), soybean aphids (e.g., Aphis glycines Matsumura), and spider mites (e.g., Tetranychus urticate). Modified soybean plants comprising the GmDR1 gene modifications and improved pathogen resistance can be identified (e.g., for screening and/or selection) by use or adaptation of assays for soybean pathogen resistance including those set forth in Nagaki et al. Plant Biotech. J, doi: 10.1111/pbi.13479 (2020) as well as in US Patent Applications US20160194657 and US20190359997, each incorporated herein by reference in their entireties. Modified soybean plants comprising the GmDR1 gene modifications and improved pest resistance can be identified (e.g., for screening and/or selection) by use or adaptation of assays for soybean pest resistance including those set forth in Nagaki et al. Plant Biotech. J, doi: 10.1111/pbi.13479 (2020) as well as in US Patent Applications US20160194657, US20180092323, and US 20200270628, each incorporated herein by reference in their entireties. Identification of the modified soybean plants comprising the GmDR1 gene modifications can also be achieved in whole, in part, in with a combination of: (i) nucleic acid analysis assays including sequencing single nucleotide polymorphism (SNP), and or hybridization-based assays to the presence of the GmDR1 gene modification in soybean genomic DNA in biologic samples; and/or assays for increased expression of the GmDR1 gene transcripts or proteins based on immunologic, qRT-PCR based techniques and/or hybridization based techniques, including those Nagaki et al. Plant Biotech. J, doi: 10.1111/pbi.13479 (2020) as well as in US Patent Applications US20160194657.

[0171] In some embodiments, modified plants are produced from cells modified according to the methods described herein without a tissue culturing step. In certain embodiments, the modified plant cell or plant does not have significant losses of methylation compared to a non-modified parent plant cell or plant. For example, the modified plant lacks significant losses of methylation in one or more promoter regions relative to the parent plant cell or plant. Similarly, in certain embodiments, an modified plant or plant cell obtained using the methods described herein lacks significant losses of methylation in protein coding regions relative to the parent cell or parent plant before modification using the modifying methods described herein.

[0172] Also contemplated are new heterogeneous populations, arrays, or libraries of plant cells and plants created by the introduction of targeted modifications at one more locations in the genome. Plant compositions of the disclosure include succeeding generations or seeds of modified plants that are grown or regenerated from plant cells or plant protoplasts modified according to the methods herein, as well as parts of those plants (including plant parts used in grafting as scions or rootstocks), or products (e. g., fruits or other edible plant parts, cleaned grains or seeds, edible oils, flours or starches, proteins, and other processed products) made from these plants or their seeds. Embodiments include plants grown or regenerated from the plant cells or plant protoplasts, wherein the plants contain cells or tissues that do not have sequence encoded by the polynucleotide donor molecule heterologously integrated at the site of a DSB, e. g., grafted plants in which the scion or rootstock contains sequence encoded by the polynucleotide donor molecule heterologously integrated at the site of a DSB, or chimeric plants in which some but not all cells or tissues contain sequence encoded by the polynucleotide donor molecule heterologously integrated at the site of a DSB. Plants in which grafting is commonly useful include many fruit trees and plants such as many citrus trees, apples, stone fruit (e. g., peaches, apricots, cherries, and plums), avocados, tomatoes, eggplant, cucumber, melons, watermelons, and grapes as well as various ornamental plants such as roses. Grafted plants can be grafts between the same or different (generally related) species. Additional related aspects include (a) a hybrid plant provided by crossing a first plant grown or regenerated from a plant cell or plant protoplast with sequence encoded by at least one polynucleotide donor molecule heterologously integrated at the site of a DSB, with a second plant, wherein the hybrid plant contains sequence encoded by the polynucleotide donor molecule heterologously integrated at the site of a DSB, and (b) a hybrid plant provided by crossing a first plant grown or regenerated from a plant cell or plant protoplast with sequence encoded by at least one polynucleotide donor molecule heterologously integrated at multiple DSB sites, with a second plant, wherein the hybrid plant contains sequence encoded by at least one polynucleotide donor molecule heterologously integrated at the site of at least one DSB; also contemplated is seed produced by the hybrid plant. Also envisioned as related aspects are progeny seed and progeny plants, including hybrid seed and hybrid plants, having the regenerated plant as a parent or ancestor. In embodiments, the plant cell (or the regenerated plant, progeny seed, and progeny plant) is diploid or polyploid. In embodiments, the plant cell (or the regenerated plant, progeny seed, and progeny plant) is haploid or can be induced to become haploid; techniques for making and using haploid plants and plant cells are known in the art, see, e. g., methods for generating haploids in Arabidopsis thaliana by crossing of a wild-type strain to a haploid-inducing strain that expresses altered forms of the centromere-specific histone CENH3, as described by Maruthachalam and Chan in “How to make haploid Arabidopsis thaliana”, a protocol publicly available at www[dot]openwetware[dot]org/images/d/d3/Haploid_Arabidopsis_protocol[dot]pdf; Ravi et al. (2014) Nature Communications, 5:5334, doi: 10.1038/ncomms6334). Examples of haploid cells include but are not limited to plant cells obtained from haploid plants and plant cells obtained from reproductive tissues, e. g., from flowers, developing flowers or flower buds, ovaries, ovules, megaspores, anthers, pollen, and microspores. In embodiments where the plant cell is haploid, the method can further include the step of chromosome doubling (e. g., by spontaneous chromosomal doubling by meiotic non-reduction, or by using a chromosome doubling agent such as colchicine, oryzalin, trifluralin, pronamide, nitrous oxide gas, anti-microtubule herbicides, anti-microtubule agents, and mitotic inhibitors) in the plant cell containing heterologous DNA sequence (i. e. sequence of the polynucleotide donor molecule integrated at the site of a DSB in the genome and genomic nucleotide sequence adjacent to the site of the DSB) to produce a doubled haploid plant cell or plant protoplast that is homozygous for the heterologous DNA sequence; yet other embodiments include regeneration of a doubled haploid plant from the doubled haploid plant cell or plant protoplast, wherein the regenerated doubled haploid plant is homozygous for the heterologous DNA sequence. Thus, aspects of the disclosure are related to the haploid plant cell or plant protoplast having the heterologous DNA sequence of the polynucleotide donor molecule integrated at the site of a DSB and genomic nucleotide sequence adjacent to the site of the DSB, as well as a doubled haploid plant cell or plant protoplast or a doubled haploid plant that is homozygous for the heterologous DNA sequence. Another aspect of the disclosure is related to a hybrid plant having at least one parent plant that is a doubled haploid plant provided by the method. Production of doubled haploid plants by these methods provides homozygosity in one generation, instead of requiring several generations of self-crossing to obtain homozygous plants; this may be particularly advantageous in slow-growing plants, such as fruit and other trees, or for producing hybrid plants that are offspring of at least one doubled-haploid plant.

[0173] Plants and plant cells that may be modified according to the methods described herein are of any species of interest, including dicots and monocots, but especially soybean species (including hybrid species).

[0174] The soybean cells and derivative plants and seeds disclosed herein including soybean seed comprising a modified soybean GmDR1 gene can be used for various purposes useful to the consumer or grower. The intact plant itself may be desirable, e. g., plants grown as cover crops or as ornamentals. In other embodiments, processed products are made from the plant or its seeds, such as extracted proteins, oils, sugars, and starches, fermentation products, animal feed or human food, wood and wood products, pharmaceuticals, and various industrial products. Thus, further related aspects of the disclosure include a processed or commodity product made from a plant or seed or plant part that includes at least some cells that contain the heterologous DNA sequence including the sequence encoded by the polynucleotide donor molecule integrated at the site of a DSB and genomic nucleotide sequence adjacent to the site of the DSB. Commodity products include, but are not limited to, harvested leaves, roots, shoots, tubers, stems, fruits, seeds, or other parts of a plant, soybean seed meals including both non-defatted and de-fatted soybean seed meal, oils (edible or inedible), fiber, extracts, fermentation or digestion products, crushed or whole grains or seeds of a plant, wood and wood pulp, or any food or non-food product. Detection of a heterologous DNA sequence that includes: (a) nucleotide sequence encoded by a polynucleotide donor molecule integrated at the site of a DSB in a genome; and (b) genomic nucleotide sequence adjacent to the site of the DSB in such a commodity product is de facto evidence that the commodity product contains or is derived from a plant cell, plant, or seed of this disclosure. In certain embodiments, commodity products and/or biological samples prepared from soybean plant parts or seed comprising a modified soybean GmDR1 gene can comprise a DNA molecule comprising the modified endogenous soybean GmDR1 gene containing the targeted modification(s) in the endogenous GmDR1 gene and at least 100 base pairs of adjoining endogenous soybean chromosomal DNA located centromere-proximal and telomere-proximal to the modified endogenous soybean GmDR1 gene. Also provided herein are methods for detecting the targeted modification(s) in the endogenous GmDR1 gene in any of the aforementioned biological samples and commodity products. Detection of the DNA molecules comprising the targeted modification(s) in the endogenous GmDR1 gene can be achieved by any combination of nucleic acid amplification (e.g., PCR amplification), hybridization, sequencing, and/or mass-spectrometry based techniques. Methods set forth for detecting foreign nucleic acids in transgenic loci set forth in US 20190136331 and U.S. Pat. No. 9,738,904, both incorporated herein by reference in their entireties, can be adapted for use in detection of the nucleic acids provided herein. In certain embodiments, such detection is achieved by amplification and/or hybridization-based detection methods using a method (e.g., selective amplification primers) and/or probe (e.g., capable of selective hybridization or generation of a specific primer extension product) which specifically recognizes the target DNA molecule (e.g., transgenic locus excision site) but does not recognize DNA from an unmodified transgenic locus. In certain embodiments, the hybridization probes (e.g., polynucleotides comprising at least 15 to 36 nucleotides of the targeted modification(s) in the endogenous GmDR1 gene) can comprise detectable labels (e.g., fluorescent, radioactive, epitope, and chemiluminescent labels). In certain embodiments, a single nucleotide polymorphism detection assay can be adapted for detection of the target DNA molecule (e.g., a targeted modification(s) insertion or formation site in the endogenous GmDR1 gene).

[0175] In certain embodiments, commodity products and/or biological samples prepared from soybean plant parts or seed comprising a modified soybean GmDR1 gene can have mycotoxin concentrations that are reduced in comparison to mycotoxin concentrations in commodity products or biological samples obtained from a reference plant lacking the modification. Mycotoxin concentrations that can be reduced include reductions in an aflatoxin, a fumonisin, an ochratoxin, a trichothecene, citrinin, zearalenone, or an Alternaria toxin concentration in comparison to a concentrations of one or more of those compounds in commodity products or biological samples obtained from a reference plant lacking the modification. Mycotoxin concentrations can be determined by mass spectroscopy or immunoassays.

[0176] Plant propagation compositions comprising any of the modified soybean seed including soybean seed comprising a modified soybean GmDR1 gene coated with a composition comprising an insecticide, a fungicide, and/or a nematocide are also provided herein. Insecticides used in such seed coatings can include neonicotinoid insecticides (e.g., clothianidin, imidacoprid, and/or thiamethoxam). Fungicides used in such seed coatings can include strobilurin fungicides (e.g., azoxystrobilurin), triazole fungicides (e.g., cyproconazole), thiophanates (e.g., thiophanate-methyl), and/or 2,6-dinitro-anilines (e.g., fluazinam). Nematocides used in such seed coatings include abamectin. The seed coatings comprising the insecticide, a fungicide, and/or a nematocide can also comprise a carrier (i.e., excipient). Carriers include woodflours, clays, activated carbon, diatomaceous earth, fine-grain inorganic solids, calcium carbonate and the like. The seed coatings comprising the insecticide, a fungicide, and/or a nematocide can also comprise sticking agents that promote adherence to the treated seed. Such sticking agents can include polyvinyl acetates, polyvinyl acetate copolymers, waxes, latex polymers, celluloses, gums, alginates, dextrins, maltodextrins, polysaccharides, fats, oils, proteins, acrylic copolymers, starches, and mixtures thereof. Seed treatments can be effected with both continuous and/or a batch seed treaters. In certain embodiments, the coated seeds may be prepared by slurrying seeds with a coating composition and then drying the coated seed. Various seed treatment compositions and methods for seed treatment disclosed in U.S. Pat. Nos. 5,106,648, 5,512,069, and 8,181,388 are incorporated herein by reference in their entireties.

[0177] In another aspect, the disclosure provides a heterologous nucleotide sequence including: (a) nucleotide sequence encoded by a polynucleotide donor molecule integrated by the methods disclosed herein at the site of a DSB in a genome, and (b) genomic nucleotide sequence adjacent to the site of the DSB. Related aspects include a plasmid, vector, or chromosome including such a heterologous nucleotide sequence, as well as polymerase primers for amplification (e. g., PCR amplification) of such a heterologous nucleotide sequence.

### Compositions and Reaction Mixtures

[0178] In one aspect, the disclosure provides a composition including: (a) a cell, and (b) a polynucleotide (such as a double-stranded DNA, a single-stranded DNA, a single-stranded DNA/RNA hybrid, or a double-stranded DNA/RNA hybrid) donor molecule that is capable of being integrated (or having its sequence integrated) (preferably by non-homologous end-joining (NHEJ)) at one or more double-strand breaks in a genome in the cell. In many embodiments of the composition, the cell is a plant cell, e. g., an isolated plant cell or a plant protoplast, or a plant cell in a plant, plant part, plant tissue, or callus. In certain embodiments, the cell is that of a photosynthetic eukaryote (e. g., green algae, red algae, diatoms, brown algae, and dinoflagellates).

[0179] In various embodiments of the composition, the plant cell is a plant cell or plant protoplast isolated from a whole plant or plant part or plant tissue (e. g., a plant cell or plant protoplast cultured in liquid medium or on solid medium), or a plant cell located in callus, an intact plant, seed, or seedling, or in a plant part or tissue. In embodiments, the plant cell is a cell of a monocot plant or of a dicot plant. In many embodiments, the plant cell is a plant cell capable of division and/or differentiation, including a plant cell capable of being regenerated into callus or a plant. In embodiments, the plant cell is capable of division and further differentiation, even capable of being regenerated into callus or into a plant. In embodiments, the plant cell is diploid, polyploid, or haploid (or can be induced to become haploid).

[0180] In embodiments, the composition includes a plant cell that includes at least one double-strand break (DSB) in its genome. Alternatively, the composition includes a plant cell in which at least one DSB will be induced in its genome, for example, by providing at least one DSB-inducing agent to the plant cell, e. g., either together with the polynucleotide (such as a double-stranded DNA, a single-stranded DNA, a single-stranded DNA/RNA hybrid, or a double-stranded DNA/RNA hybrid) donor molecule or separately. Thus, the composition optionally further includes at least one DSB-inducing agent. In embodiments, the composition optionally further includes at least one chemical, enzymatic, or physical delivery agent, or a combination thereof; such delivery agents and methods for their use are described in detail in the paragraphs following the heading “Delivery Methods and Delivery Agents”. In embodiments, the DSB-inducing agent is at least one of the group consisting of:
[0181] (a) a nuclease selected from the group consisting of an RNA-guided nuclease, an RNA-guided DNA endonuclease, a type II Cas nuclease, a Cas9, a type V Cas nuclease, a Cpf1, a CasY, a CasX, a C2c1, a C2c3, an engineered nuclease, a codon-optimized nuclease, a zinc-finger nuclease (ZFN), a transcription activator-like effector nuclease (TAL-effector nuclease), an Argonaute, and a meganuclease or engineered meganuclease;
[0182] (b) a polynucleotide encoding one or more nucleases capable of effecting site-specific alteration (such as introduction of a DSB) of a target nucleotide sequence; and
[0183] (c) a guide RNA (gRNA) for an RNA-guided nuclease, or a DNA encoding a gRNA for an RNA-guided nuclease.

[0184] In embodiments, the composition includes (a) a cell; (b) a polynucleotide (such as a double-stranded DNA, a single-stranded DNA, a single-stranded DNA/RNA hybrid, or a double-stranded DNA/RNA hybrid) donor molecule, capable of being integrated (or having its sequence integrated) at a DSB; (c) a Cas9, a Cpf1, a CasY, a CasX, a C2c1, or a C2c3 nuclease; and (d) at least one guide RNA. In an embodiment, the composition includes (a) a cell; (b) a polynucleotide (such as a double-stranded DNA, a single-stranded DNA, a single-stranded DNA/RNA hybrid, or a double-stranded DNA/RNA hybrid) donor molecule, capable of being integrated (or having its sequence integrated) at a DSB; (c) at least one ribonucleoprotein including a CRISPR nuclease and a guide RNA.

[0185] In embodiments of the composition, the polynucleotide donor molecule is double-stranded and blunt-ended, or is double stranded and has an overhang or “sticky end” consisting of unpaired nucleotides (e. g., 1, 2, 3, 4, 5, or 6 unpaired nucleotides) at one terminus or both termini; in other embodiments, the polynucleotide donor molecule is a single-stranded DNA or a single-stranded DNA/RNA hybrid. In an embodiment, the polynucleotide donor molecule is a double-stranded DNA or DNA/RNA hybrid molecule that is blunt-ended or that has an overhang at one terminus or both termini, and that has about 18 to about 300 base-pairs, or about 20 to about 200 base-pairs, or about 30 to about 100 base-pairs, and having at least one phosphorothioate bond between adjacent nucleotides at a 5′ end, 3′ end, or both 5′ and 3′ ends. In embodiments, the polynucleotide donor molecule is a double-stranded DNA, a single-stranded DNA, a single-stranded DNA/RNA hybrid, or a double-stranded DNA/RNA hybrid, and includes single strands of at least 11, at least 18, at least 20, at least 30, at least 40, at least 60, at least 80, at least 100, at least 120, at least 140, at least 160, at least 180, at least 200, at least 240, at least 280, or at least 320 nucleotides. In embodiments, the polynucleotide donor molecule includes chemically modified nucleotides; in embodiments, the naturally occurring phosphodiester backbone of the polynucleotide molecule is partially or completely modified with phosphorothioate, phosphorodithioate, or methylphosphonate internucleotide linkage modifications, or the polynucleotide donor molecule includes modified nucleoside bases or modified sugars, or the polynucleotide donor molecule is labelled with a fluorescent moiety or other detectable label. In an embodiment, the polynucleotide donor molecule is double-stranded and perfectly base-paired through all or most of its length, with the possible exception of any unpaired nucleotides at either terminus or both termini. In another embodiment, the polynucleotide donor molecule is double-stranded and includes one or more non-terminal mismatches or non-terminal unpaired nucleotides within the otherwise double-stranded duplex. Other related embodiments include single- or double-stranded DNA/RNA hybrid donor molecules. Additional description of the polynucleotide donor molecule is found above in the paragraphs following the heading “Polynucleotide Molecules”.

[0186] In embodiments of the composition, the polynucleotide donor molecule includes:
[0187] (a) a nucleotide sequence that is recognizable by a specific binding agent;
[0188] (b) a nucleotide sequence encoding an RNA molecule or an amino acid sequence that is recognizable by a specific binding agent;
[0189] (c) a nucleotide sequence that encodes an RNA molecule or an amino acid sequence that binds specifically to a ligand;
[0190] (d) a nucleotide sequence that is responsive to a specific change in the physical environment, or
[0191] (e) a nucleotide sequence encoding an RNA molecule or an amino acid sequence that is responsive to a specific change in the physical environment;
[0192] (f) a nucleotide sequence encoding at least one stop codon on each strand;
[0193] (g) a nucleotide sequence encoding at least one stop codon within each reading frame on each strand; or
[0194] (h) at least partially self-complementary sequence, such that the polynucleotide molecule encodes a transcript that is capable of forming at least partially double-stranded RNA; or
[0195] (i) a combination of any of (a)-(h).

[0196] Additional description relating to these various embodiments of nucleotide sequences included in the polynucleotide donor molecule is found in the section headed “Methods of changing expression of a sequence of interest in a genome”.

[0197] In another aspect, the disclosure provides a reaction mixture including: (a) a plant cell having a double-strand break (DSB) at least one locus in its genome; and (b) a polynucleotide (such as a double-stranded DNA, a single-stranded DNA, a single-stranded DNA/RNA hybrid, or a double-stranded DNA/RNA hybrid) donor molecule capable of being integrated or inserted (or having its sequence integrated or inserted) at the DSB (preferably by non-homologous end-joining (NHEJ)), with a length of between about 18 to about 300 base-pairs (or nucleotides, if single-stranded), or between about 30 to about 100 base-pairs (or nucleotides, if single-stranded); wherein sequence encoded by the polynucleotide donor molecule, if integrated at the DSB, forms a heterologous insertion (that is to say, resulting in a concatenated nucleotide sequence that is a combination of the sequence of the polynucleotide molecule and at least some of the genomic sequence adjacent to the site of DSB, wherein the concatenated sequence is heterologous, i. e., would not otherwise or does not normally occur at the site of insertion). In embodiments, the product of the reaction mixture includes a plant cell in which sequence encoded by the polynucleotide donor molecule has been integrated at the site of the DSB.

[0198] In many embodiments of the reaction mixture, the cell is a plant cell, e. g., an isolated plant cell or a plant protoplast, or a plant cell in a plant, plant part, plant tissue, or callus. In various embodiments of the reaction mixture, the plant cell is a plant cell or plant protoplast isolated from a whole plant or plant part or plant tissue (e. g., a plant cell or plant protoplast cultured in liquid medium or on solid medium), or a plant cell located in callus, an intact plant, seed, or seedling, or in a plant part or tissue. In embodiments, the plant cell is a cell of a monocot plant or of a dicot plant. In many embodiments, the plant cell is a plant cell capable of division and/or differentiation, including a plant cell capable of being regenerated into callus or a plant. In embodiments, the plant cell is capable of division and further differentiation, even capable of being regenerated into callus or into a plant. In embodiments, the plant cell is diploid, polyploid, or haploid (or can be induced to become haploid).

[0199] In embodiments, the reaction mixture includes a plant cell that includes at least one double-strand break (DSB) in its genome. Alternatively, the reaction mixture includes a plant cell in which at least one DSB will be induced in its genome, for example, by providing at least one DSB-inducing agent to the plant cell, e. g., either together with a polynucleotide (such as a double-stranded DNA, a single-stranded DNA, a single-stranded DNA/RNA hybrid, or a double-stranded DNA/RNA hybrid) donor molecule capable of being integrated or inserted (or having its sequence integrated or inserted) at the DSB, or separately. Thus, the reaction mixture optionally further includes at least one DSB-inducing agent. In embodiments, the reaction mixture optionally further includes at least one chemical, enzymatic, or physical delivery agent, or a combination thereof; such delivery agents and methods for their use are described in detail in the paragraphs following the heading “Delivery Methods and Delivery Agents”. In embodiments, the DSB-inducing agent is at least one of the group consisting of:
[0200] (a) a nuclease selected from the group consisting of an RNA-guided nuclease, an RNA-guided DNA endonuclease, a type II Cas nuclease, a Cas9, a type V Cas nuclease, a Cpf1, a CasY, a CasX, a C2c1, a C2c3, an engineered nuclease, a codon-optimized nuclease, a zinc-finger nuclease (ZFN), a transcription activator-like effector nuclease (TAL-effector nuclease), an Argonaute, and a meganuclease or engineered meganuclease;
[0201] (b) a polynucleotide encoding one or more nucleases capable of effecting site-specific alteration (such as introduction of a DSB) of a target nucleotide sequence; and
[0202] (c) a guide RNA (gRNA) for an RNA-guided nuclease, or a DNA encoding a gRNA for an RNA-guided nuclease.

[0203] In embodiments, the reaction mixture includes (a) a plant cell; (b) a polynucleotide (such as a double-stranded DNA, a single-stranded DNA, a single-stranded DNA/RNA hybrid, or a double-stranded DNA/RNA hybrid) donor molecule capable of being integrated or inserted (or having its sequence integrated or inserted) at the DSB; (c) a Cas9, a Cpf1, a CasY, a CasX, a C2c1, or a C2c3 nuclease; and (d) at least one guide RNA. In an embodiment, the reaction mixture includes (a) a plant cell or a plant protoplast; (b) a polynucleotide (such as a double-stranded DNA, a single-stranded DNA, a single-stranded DNA/RNA hybrid, or a double-stranded DNA/RNA hybrid) donor molecule capable of being integrated or inserted (or having its sequence integrated or inserted) at the DSB; (c) at least one ribonucleoprotein including a CRISPR nuclease and a guide RNA. In an embodiment, the reaction mixture includes (a) plant cell or a plant protoplast; (b) a polynucleotide (such as a double-stranded DNA, a single-stranded DNA, a single-stranded DNA/RNA hybrid, or a double-stranded DNA/RNA hybrid) donor molecule capable of being integrated or inserted (or having its sequence integrated or inserted) at the DSB; (c) at least one ribonucleoprotein including Cas9 and an sgRNA.

[0204] In embodiments of the reaction mixture, the polynucleotide (such as a double-stranded DNA, a single-stranded DNA, a single-stranded DNA/RNA hybrid, or a double-stranded DNA/RNA hybrid) donor molecule includes:
[0205] (a) a nucleotide sequence that is recognizable by a specific binding agent;
[0206] (b) a nucleotide sequence encoding an RNA molecule or an amino acid sequence that is recognizable by a specific binding agent;
[0207] (c) a nucleotide sequence that encodes an RNA molecule or an amino acid sequence that binds specifically to a ligand;
[0208] (d) a nucleotide sequence that is responsive to a specific change in the physical environment; or
[0209] (e) a nucleotide sequence encoding an RNA molecule or an amino acid sequence that is responsive to a specific change in the physical environment;
[0210] (f) a nucleotide sequence encoding at least one stop codon on each strand;
[0211] (g) a nucleotide sequence encoding at least one stop codon within each reading frame on each strand; or
[0212] (h) at least partially self-complementary sequence, such that the polynucleotide molecule encodes a transcript that is capable of forming at least partially double-stranded RNA; or
[0213] (i) a combination of any of (a)-(h).

[0214] Additional description relating to these various embodiments of nucleotide sequences included in the polynucleotide donor molecule is found in the section headed “Methods of changing expression of a sequence of interest in a genome”.

### Polynucleotides for Disrupting Gene Expression

[0215] In another aspect, the disclosure provides a polynucleotide (such as a double-stranded DNA, a single-stranded DNA, a single-stranded DNA/RNA hybrid, or a double-stranded DNA/RNA hybrid) molecule for disrupting gene expression, including double-stranded polynucleotides containing at least 18 base-pairs and encoding at least one stop codon in each possible reading frame on each strand and single-stranded polynucleotides containing at least 11 contiguous nucleotides and encoding at least one stop codon in each possible reading frame on the strand. Such a stop-codon-containing polynucleotide, when integrated or inserted at the site of a DSB in a genome, disrupts or hinders translation of an encoded amino acid sequence. In embodiments, the polynucleotide is a double-stranded DNA or double-stranded DNA/RNA hybrid molecule including at least 18 contiguous base-pairs and encoding at least one stop codon in each possible reading frame on either strand; in embodiments, the polynucleotide is a double-stranded DNA or double-stranded DNA/RNA hybrid molecule that is blunt-ended; in other embodiments, the polynucleotide is a double-stranded DNA or double-stranded DNA/RNA hybrid molecule that has one or more overhangs or unpaired nucleotides at one or both termini. In embodiments, the polynucleotide is double-stranded and includes between about 18 to about 300 nucleotides on each strand. In embodiments, the polynucleotide is a single-stranded DNA or a single-stranded DNA/RNA hybrid molecule including at least 11 contiguous nucleotides and encoding at least one stop codon in each possible reading frame on the strand. In embodiments, the polynucleotide is single-stranded and includes between 11 and about 300 contiguous nucleotides in the strand.

[0216] In embodiments, the polynucleotide for disrupting gene expression further includes a nucleotide sequence that provides a useful function when integrated into the site of a DSB in a genome. For example, in various non-limiting embodiments the polynucleotide further includes: sequence that is recognizable by a specific binding agent or that binds to a specific molecule or encodes an RNA molecule or an amino acid sequence that binds to a specific molecule, or sequence that is responsive to a specific change in the physical environment or encodes an RNA molecule or an amino acid sequence that is responsive to a specific change in the physical environment, or heterologous sequence, or sequence that serves to stop transcription at the site of the DSB, or sequence having secondary structure (e. g., double-stranded stems or stem-loops) or than encodes a transcript having secondary structure (e. g., double-stranded RNA that is cleavable by a Dicer-type ribonuclease).

[0217] In an embodiment, the polynucleotide for disrupting gene expression is a double-stranded DNA or a double-stranded DNA/RNA hybrid molecule, wherein each strand of the polynucleotide includes at least 18 and fewer than 200 contiguous base-pairs, wherein the number of base-pairs is not divisible by 3, and wherein each strand encodes at least one stop codon in each possible reading frame in the 5′ to 3′ direction. In an embodiment, the polynucleotide is a double-stranded DNA or a double-stranded DNA/RNA hybrid molecule, wherein the polynucleotide includes at least one phosphorothioate modification.

[0218] Related aspects include larger polynucleotides such as a plasmid, vector, or chromosome including the polynucleotide for disrupting gene expression, as well as polymerase primers for amplification of the polynucleotide for disrupting gene expression.

### Methods of Identifying the Locus of a Double-Stranded Break

[0219] In another aspect, the disclosure provides a method of identifying the locus of at least one double-stranded break (DSB) in genomic DNA in a cell (such as a plant cell or plant protoplast) including the genomic DNA, the method including: (a) contacting the genomic DNA having a DSB with a polynucleotide (such as a double-stranded DNA, a single-stranded DNA, a single-stranded DNA/RNA hybrid, or a double-stranded DNA/RNA hybrid) molecule, wherein the polynucleotide donor molecule is capable of being integrated (or having its sequence integrated) at the DSB and has a length of at least 2, at least 3, at least 4, at least 5, at least 6, at least 7, at least 8, at least 9, at least 10, or at least 11 base-pairs if double-stranded (or nucleotides if single-stranded), or between about 2 to about 320 base-pairs if double-stranded (or nucleotides if single-stranded), or between about 2 to about 500 base-pairs if double-stranded (or nucleotides if single-stranded), or between about 5 to about 500 base-pairs if double-stranded (or nucleotides if single-stranded), or between about 5 to about 300 base-pairs if double-stranded (or nucleotides if single-stranded), or between about 11 to about 300 base-pairs if double-stranded (or nucleotides if single-stranded), or about 18 to about 300 base-pairs if double-stranded (or nucleotides if single-stranded), or between about 30 to about 100 base-pairs if double-stranded (or nucleotides if single-stranded); wherein sequence encoded by the polynucleotide donor molecule, if integrated at the DSB, forms a heterologous insertion; and (b) using at least part of the sequence encoded by the polynucleotide molecule as a target for PCR primers to allow amplification of DNA in the locus of the double-stranded break. In embodiments, the genomic DNA is that of a nucleus, mitochondrion, or plastid. In embodiments, the DSB locus is identified by amplification using primers specific for DNA sequence encoded by the polynucleotide molecule alone; in other embodiments, the DSB locus is identified by amplification using primers specific for a combination of DNA sequence encoded by the polynucleotide donor molecule and genomic DNA sequence flanking the DSB. Such identification using a heterologously integrated DNA sequence (i. e., that encoded by the polynucleotide molecule) is useful, e. g., to distinguish a cell (such as a plant cell or plant protoplast) containing sequence encoded by the polynucleotide molecule integrated at the DSB from a cell that does not. Identification of an edited genome from a non-edited genome is important for various purposes, e. g., for commercial or regulatory tracking of cells or biological material such as plants or seeds containing an edited genome.

[0220] In a related aspect, the disclosure provides a method of identifying the locus of double-stranded breaks (DSBs) in genomic DNA in a pool of cells (such as a pool of plant cells or plant protoplasts), wherein the pool of cells includes cells having genomic DNA with sequence encoded by a polynucleotide (such as a double-stranded DNA, a single-stranded DNA, a single-stranded DNA/RNA hybrid, or a double-stranded DNA/RNA hybrid) donor molecule inserted at the locus of the double stranded breaks; wherein the polynucleotide donor molecule is capable of being integrated (or having its sequence integrated) at the DSB and has a length of at least 2, at least 3, at least 4, at least 5, at least 6, at least 7, at least 8, at least 9, at least 10, or at least 11 base-pairs if double-stranded (or nucleotides if single-stranded), or between about 2 to about 320 base-pairs if double-stranded (or nucleotides if single-stranded), or between about 2 to about 500 base-pairs if double-stranded (or nucleotides if single-stranded), or between about 5 to about 500 base-pairs if double-stranded (or nucleotides if single-stranded), or between about 5 to about 300 base-pairs if double-stranded (or nucleotides if single-stranded), or between about 11 to about 300 base-pairs if double-stranded (or nucleotides if single-stranded), or about 18 to about 300 base-pairs if double-stranded (or nucleotides if single-stranded), or between about 30 to about 100 base-pairs if double-stranded (or nucleotides if single-stranded); wherein sequence encoded by the polynucleotide donor molecule, if integrated at the DSB, forms a heterologous insertion; wherein the sequence encoded by the polynucleotide molecule is used as a target for PCR primers to allow amplification of DNA in the region of the double-stranded breaks. In embodiments, the genomic DNA is that of a nucleus, mitochondrion, or plastid. In embodiments, the pool of cells is a population of plant cells or plant protoplasts, wherein the population of plant cells or plant protoplasts include multiple different DSBs (e. g., induced by different guide RNAs) in the genome. In embodiments, each DSB locus is identified by amplification using primers specific for DNA sequence encoded by the polynucleotide molecule alone; in other embodiments, each DSB locus is identified by amplification using primers specific for a combination of DNA sequence encoded by the polynucleotide molecule and genomic DNA sequence flanking the DSB. Such identification using a heterologously integrated DNA sequence (i. e., sequence encoded by the polynucleotide molecule) is useful, e. g., to identify a cell (such as a plant cell or plant protoplast) containing sequence encoded by the polynucleotide molecule integrated at a DSB from a cell that does not.

[0221] In embodiments, the pool of cells is a pool of isolated plant cells or plant protoplasts in liquid or suspension culture, or cultured in or on semi-solid or solid media. In embodiments, the pool of cells is a pool of plant cells or plant protoplasts encapsulated in a polymer or other encapsulating material, enclosed in a vesicle or liposome, or embedded in or attached to a matrix or other solid support (e. g., beads or microbeads, membranes, or solid surfaces). In embodiments, the pool of cells is a pool of plant cells or plant protoplasts encapsulated in a polysaccharide (e. g., pectin, agarose). In embodiments, the pool of cells is a pool of plant cells located in a plant, plant part, or plant tissue, and the cells are optionally isolated from the plant, plant part, or plant tissue in a step following the integration of a polynucleotide at a DSB.

[0222] In embodiments, the polynucleotide donor molecule that is integrated (or has sequence that is integrated) at the DSB is double-stranded and blunt-ended; in other embodiments the polynucleotide donor molecule is double-stranded and has an overhang or“sticky end” consisting of unpaired nucleotides (e. g., 1, 2, 3, 4, 5, or 6 unpaired nucleotides) at one terminus or both termini. In an embodiment, the polynucleotide donor molecule that is integrated (or has sequence that is integrated) at the DSB is a double-stranded DNA or double-stranded DNA/RNA hybrid molecule of about 18 to about 300 base-pairs, or about 20 to about 200 base-pairs, or about 30 to about 100 base-pairs, and having at least one phosphorothioate bond between adjacent nucleotides at a 5′ end, 3′ end, or both 5′ and 3′ ends. In embodiments, the polynucleotide donor molecule includes single strands of at least 11, at least 18, at least 20, at least 30, at least 40, at least 60, at least 80, at least 100, at least 120, at least 140, at least 160, at least 180, at least 200, at least 240, at least 280, or at least 320 nucleotides. In embodiments, the polynucleotide donor molecule has a length of at least 2, at least 3, at least 4, at least 5, at least 6, at least 7, at least 8, at least 9, at least 10, or at least 11 base-pairs if double-stranded (or nucleotides if single-stranded), or between about 2 to about 320 base-pairs if double-stranded (or nucleotides if single-stranded), or between about 2 to about 500 base-pairs if double-stranded (or nucleotides if single-stranded), or between about 5 to about 500 base-pairs if double-stranded (or nucleotides if single-stranded), or between about 5 to about 300 base-pairs if double-stranded (or nucleotides if single-stranded), or between about 11 to about 300 base-pairs if double-stranded (or nucleotides if single-stranded), or about 18 to about 300 base-pairs if double-stranded (or nucleotides if single-stranded), or between about 30 to about 100 base-pairs if double-stranded (or nucleotides if single-stranded). In embodiments, the polynucleotide donor molecule includes chemically modified nucleotides; in embodiments, the naturally occurring phosphodiester backbone of the polynucleotide donor molecule is partially or completely modified with phosphorothioate, phosphorodithioate, or methylphosphonate internucleotide linkage modifications, or the polynucleotide donor molecule includes modified nucleoside bases or modified sugars, or the polynucleotide donor molecule is labelled with a fluorescent moiety or other detectable label. In an embodiment, the polynucleotide donor molecule is double-stranded and is perfectly base-paired through all or most of its length, with the possible exception of any unpaired nucleotides at either terminus or both termini. In another embodiment, the polynucleotide donor molecule is double-stranded and includes one or more non-terminal mismatches or non-terminal unpaired nucleotides within the otherwise double-stranded duplex. In related embodiments, the polynucleotide donor molecule that is integrated at the DSB is a single-stranded DNA or a single-stranded DNA/RNA hybrid. Additional description of the polynucleotide donor molecule is found above in the paragraphs following the heading “Polynucleotide Molecules”.

[0223] In embodiments, the polynucleotide (such as a double-stranded DNA, a single-stranded DNA, a single-stranded DNA/RNA hybrid, or a double-stranded DNA/RNA hybrid) donor molecule that is integrated at the DSB includes a nucleotide sequence that, if integrated (or has sequence that is integrated) at the DSB, forms a heterologous insertion that is not normally found in the genome. In embodiments, sequence encoded by the polynucleotide molecule that is integrated at the DSB includes a nucleotide sequence that does not normally occur in the genome containing the DSB; this can be established by sequencing of the genome, or by hybridization experiments. In certain embodiments, sequence encoded by the polynucleotide molecule, when integrated at the DSB, not only permits identification of the locus of the DSB, but also imparts a functional trait to the cell including the genomic DNA, or to an organism including the cell; in non-limiting examples, sequence encoded by the polynucleotide molecule that is integrated at the DSB includes at least one of the nucleotide sequences selected from the group consisting of:
[0224] (a) DNA encoding at least one stop codon, or at least one stop codon on each strand, or at least one stop codon within each reading frame on each strand;
[0225] (b) DNA encoding heterologous primer sequence (e. g., a sequence of about 18 to about 22 contiguous nucleotides, or of at least 18, at least 20, or at least 22 contiguous nucleotides that can be used to initiate DNA polymerase activity at the site of the DSB);
[0226] (c) DNA encoding a unique identifier sequence (e. g., a sequence that when inserted at the DSB creates a heterologous sequence that can be used to identify the presence of the insertion);
[0227] (d) DNA encoding a transcript-stabilizing sequence;
[0228] (e) DNA encoding a transcript-destabilizing sequence;
[0229] (f) a DNA aptamer or DNA encoding an RNA aptamer or amino acid aptamer; and
[0230] (g) DNA that includes or encodes a sequence recognizable by a specific binding agent.
   Methods of Identifying the Nucleotide Sequence of a Locus in the Genome that is Associated with a Phenotype

[0231] In another aspect, the disclosure provides a method of identifying the nucleotide sequence of a locus in the genome that is associated with a phenotype, the method including the steps of:
[0232] (a) providing to a population of cells (such as plant cells or plant protoplasts) having the genome:
   [0233] (i) multiple different guide RNAs (gRNAs) to induce multiple different double strand breaks (DSBs) in the genome, wherein each DSB is produced by an RNA-guided nuclease guided to a locus on the genome by one of the gRNAs, and
   [0234] (ii) polynucleotide (such as a double-stranded DNA, a single-stranded DNA, a single-stranded DNA/RNA hybrid, or a double-stranded DNA/RNA hybrid) donor molecules having a defined nucleotide sequence, wherein the polynucleotide molecules are capable of being integrated (or have sequence that is integrated) into the DSBs by non-homologous end-joining (NHEJ);
[0235] whereby when sequence encoded by at least some of the polynucleotide molecules are inserted into at least some of the DSBs, a genetically heterogeneous population of cells is produced;
[0236] (b) selecting from the genetically heterogeneous population of cells a subset of cells that exhibit a phenotype of interest;
[0237] (c) using a pool of PCR primers that bind to sequence encoded by the polynucleotide molecules to amplify from the subset of cells DNA from the locus of a DSB into which sequence encoded by one of the polynucleotide molecules has been inserted; and
[0238] (d) sequencing the amplified DNA to identify the locus associated with the phenotype of interest.

[0239] In embodiments, the cells are plant cells or plant protoplasts or algal cells. In embodiments, the genetically heterogeneous population of cells undergoes one or more doubling cycles; for example, the population of cells is provided with growth conditions that should normally result in cell division, and at least some of the cells undergo one or more doublings. In embodiments, the genetically heterogeneous population of cells is subjected to conditions permitting expression of the phenotype of interest. In embodiments, the cells are provided in a single pool or population (e. g., in a single container); in other embodiments, the cells are provided in an arrayed format (e. g., in microwell plates or in droplets in a microfluidics device or attached individually to particles or beads).

[0240] In embodiments, the RNA-guided nuclease or a polynucleotide that encodes the RNA-guided nuclease is exogenously provided to the population of cells. In embodiments, each gRNA is provided as a polynucleotide composition including: (a) a CRISPR RNA (crRNA) that includes the gRNA, or a polynucleotide that encodes a crRNA, or a polynucleotide that is processed into a crRNA; or (b) a single guide RNA (sgRNA) that includes the gRNA, or a polynucleotide that encodes a sgRNA, or a polynucleotide that is processed into a sgRNA In embodiments, the multiple guide RNAs are provided as ribonucleoproteins (e. g., Cas9 nuclease molecules complexed with different gRNAs to form different RNPs). In embodiments, each gRNA is provided as a ribonucleoprotein (RNP) including the RNA-guided nuclease and an sgRNA. In embodiments, multiple guide RNAs are provided, as well as a single polynucleotide donor molecule having a sequence to be integrated at the resulting DSBs; in other embodiments, multiple guide RNAs are provided, as well as different polynucleotide donor molecules having a sequence to be integrated at the resulting multiple DSBs.

[0241] In another embodiment, a detection method is provided for identifying a plant as having been subjected to genomic modification according to a targeted modification method described herein, where that modification method yields a low frequency of off-target mutations. The detection method comprises a step of identifying the off-target mutations (e.g., an insertion of a non-specific sequence, a deletion, or an indel resulting from the use of the targeting agents, or insertions of part or all of a sequence encoded by one or more polynucleotide donor molecules at one or more coding or non-coding loci in a genome). In a related embodiment, the detection method is used to track of movement of a plant cell or plant or product thereof through a supply chain. The presence of such an identified mutation in a processed product or commodity product is de facto evidence that the product contains or is derived from a plant cell, plant, or seed of this disclosure. In related embodiments, the presence of the off-target mutations are identified using PCR, a chip-based assay, probes specific for the donor sequences, or any other technique known in the art to be useful for detecting the presence of particular nucleic acid sequences.

### EXAMPLES

### Example 1

[0242] This example illustrates techniques for preparing a plant cell or plant protoplast useful in compositions and methods of the disclosure, for example, in providing a reaction mixture including a plant cell having a double-strand break (DSB) at least one locus in its genome. More specifically this non-limiting example describes techniques for preparing isolated, viable plant protoplasts from monocot and dicot plants.

[0243] The following mesophyll protoplast preparation protocol (modified from one publicly available at molbio[dot]mgh[dot]harvard.edu/sheenweb/protocols_reg[dot]html) is generally suitable for use with monocot plants such as maize (Zea mays) and rice (Oryza sativa):

[0244] Prepare an enzyme solution containing 0.6 molar mannitol, 10 millimolar MES pH 5.7, 1.5% cellulase R10, and 0.3% macerozyme R10. Heat the enzyme solution at 50-55 degrees Celsius for 10 minutes to inactivate proteases and accelerate enzyme solution and cool it to room temperature before adding 1 millimolar CaCl₂, 5 millimolar β-mercaptoethanol, and 0.1% bovine serum albumin. Pass the enzyme solution through a 0.45 micrometer filter. Prepare a washing solution containing 0.6 molar mannitol, 4 millimolar MES pH 5.7, and 20 millimolar KCl.

[0245] Obtain second leaves of the monocot plant (e. g., maize or rice) and cut out the middle 6-8 centimeters. Stack ten leaf sections and cut into 0.5 millimeter-wide strips without bruising the leaves. Submerge the leaf strips completely in the enzyme solution in a petri dish, cover with aluminum foil, and apply vacuum for 30 minutes to infiltrate the leaf tissue. Transfer the dish to a platform shaker and incubate for an additional 2.5 hours' digestion with gentle shaking (40 rpm). After digestion, carefully transfer the enzyme solution (now containing protoplasts) using a serological pipette through a 35 micrometer nylon mesh into a round-bottom tube; rinse the petri with 5 milliliters of washing solution and filter this through the mesh as well. Centrifuge the protoplast suspension at 1200 rpm, 2 minutes in a swing-bucket centrifuge. Aspirate off as much of the supernatant as possible without touching the pellet; gently wash the pellet once with 20 milliliters washing buffer and remove the supernatant carefully. Gently resuspend the pellet by swirling in a small volume of washing solution, then resuspend in 10-20 milliliters of washing buffer. Place the tube upright on ice for 30 minutes-4 hours (no longer). After resting on ice, remove the supernatant by aspiration and resuspend the pellet with 2-5 milliliters of washing buffer. Measure the concentration of protoplasts using a hemocytometer and adjust the concentration to 2×10\hat{ }5 protoplasts/milliliter with washing buffer.

[0246] The following mesophyll protoplast preparation protocol (modified from one described by Niu and Sheen (2012)Methods Mol. Biol., 876:195-206, doi: 10.1007/978-1-61779-809-2_16) is generally suitable for use with dicot plants such as Arabidopsis thaliana and brassicas such as kale (Brassica oleracea).

[0247] Prepare an enzyme solution containing 0.4 M mannitol, 20 millimolar KCl, 20 millimolar MES pH 5.7, 1.5% cellulase R10, and 0.4% macerozyme R10. Heat the enzyme solution at 50-55 degrees Celsius for 10 minutes to inactivate proteases and accelerate enzyme solution, and then cool it to room temperature before adding 10 millimolar CaCl₂, 5 millimolar β-mercaptoethanol, and 0.1% bovine serum albumin. Pass the enzyme solution through a 0.45 micrometer filter. Prepare a “W5” solution containing 154 millimolar NaCl, 125 millimolar CaCl₂, 5 millimolar KCl, and 2 millimolar MES pH 5.7. Prepare a “MMg solution” solution containing 0.4 molar mannitol, 15 millimolar MgCl₂, and 4 millimolar MES pH 5.7.

[0248] Obtain second or third pair true leaves of the dicot plant (e. g., a brassica such as kale) and cut out the middle section. Stack 4-8 leaf sections and cut into 0.5 millimeter-wide strips without bruising the leaves. Submerge the leaf strips completely in the enzyme solution in a petri dish, cover with aluminum foil, and apply vacuum for 30 minutes to infiltrate the leaf tissue. Transfer the dish to a platform shaker and incubate for an additional 2.5 hours' digestion with gentle shaking (40 rpm). After digestion, carefully transfer the enzyme solution (now containing protoplasts) using a serological pipette through a 35 micrometer nylon mesh into a round-bottom tube; rinse the petri dish with 5 milliliters of washing solution and filter this through the mesh as well. Centrifuge the protoplast suspension at 1200 rpm, 2 minutes in a swing-bucket centrifuge. Aspirate off as much of the supernatant as possible without touching the pellet; gently wash the pellet once with 20 milliliters washing buffer and remove the supernatant carefully. Gently resuspend the pellet by swirling in a small volume of washing solution, then resuspend in 10-20 milliliters of washing buffer. Place the tube upright on ice for 30 minutes-4 hours (no longer). After resting on ice, remove the supernatant by aspiration and resuspend the pellet with 2-5 milliliters of MMg solution. Measure the concentration of protoplasts using a hemocytometer and adjust the concentration to 2×10\hat{ }5 protoplasts/milliliter with MMg solution.

### Example 2

[0249] This example illustrates culture conditions effective in improving viability of plant cells or plant protoplasts. More specifically, this non-limiting example describes media and culture conditions for improving viability of isolated plant protoplasts.

[0250] Table 1 provides the compositions of different liquid basal media suitable for culturing plant cells or plant protoplasts; final pH of all media was adjusted to 5.8 if necessary.

TABLE 1

| | Concentration (mg/L unless otherwise noted) | | | | |
|---|---|---|---|---|---|
| Component | SH | 8p | PIM | P2 | YPIMB- |
| Casamino acids | | 250 | | | |
| Coconut water | | 20000 | | | |
| Ascorbic acid | | 2 | | | |
| biotin | | 0.01 | 0.01 | | |
| Cholicalciferol | | 0.01 | | | |
| (Vitamin D-3) | | | | | |
| choline chloride | | 1 | | | |
| Citric acid | | 40 | | | |
| Cyanocobalamin | | 0.02 | | | |
| (Vitamin B-12) | | | | | |
| D-calcium pantothenate | | 1 | 1 | | |
| D-Cellobiose | | 250 | | | |
| D-Fructose | | 250 | | | |
| D-Mannose | | 250 | | | |
| D-Ribose | | 250 | | | |
| D-Sorbitol | | 250 | | | |
| D-Xylose | | 250 | | | |
| folic acid | | 0.4 | 0.2 | | |
| Fumaric acid | | 40 | | | |
| L-Malic acid | | 40 | | | |
| L-Rhamnose | | 250 | | | |
| p-Aminobenzoic acid | | 0.02 | | | |
| Retinol (Vitamin A) | | 0.01 | | | |
| Riboflavin | | 0.2 | | | |
| Sodium pyruvate | | 20 | | | |
| 2,4-D | 0.5 | 0.2 | 1 | 5 | 1 |
| 6-benzylaminopurine (BAP) | | | | | 1 |
| Indole-3-butyric | | | | 2.5 | |
| acid (IBA) | | | | | |
| Kinetin | 0.1 | | | | |
| Naphthaleneacetic | | 1 | | | |
| acid (NAA) | | | | | |
| parachlorophenoxyacetate | 2 | | | | |
| (pCPA) | | | | | |
| Thidiazuron | | | 0.022 | | |
| Zeatin | | 0.5 | | | |
| AlCl3 | | | 0.03 | | |
| Bromocresol purple | | | 8 | | |
| CaCl₂•2H₂O | 200 | 600 | 440 | 200 | 440 |
| CoCl₂•6H₂O | 0.1 | 0.025 | | 0.1 | |
| CuSO₄•5H₂O | 0.2 | 0.025 | 0.03 | 0.2 | 0.03 |
| D-Glucose | | 68400 | 40000 | | 40000 |
| D-Mannitol | 52000 | 250 | 60000 | 52000 | 60000 |
| FeSO₄•7H₂O | 15 | 27.8 | 15 | 15 | 15 |
| H₃BO₃ | 5 | 3 | 1 | 5 | 1 |
| KCl | | 300 | | | |
| KH₂PO₄ | | 170 | 170 | | 170 |
| KI | 1 | 0.75 | 0.01 | 1 | 0.01 |
| KNO₃ | 2500 | 1900 | 505 | 2500 | 505 |
| MES pH 5.8 (mM) | | | 3.586 | 25 | 25 |
| MgSO₄•7H₂O | 400 | 300 | 370 | 400 | 370 |
| MnSO₄•H₂O | 10 | 10 | 0.1 | 10 | 0.1 |
| Na₂EDTA | 20 | 37.3 | 20 | 20 | 20 |
| Na₂MoO₄•2H₂O | 0.1 | 0.25 | | 0.1 | |
| NH₄H₂PO₄ | 300 | | | 300 | |
| NH₄NO₃ | | 600 | 160 | | 160 |
| NiCl₂•6H₂O | | | 0.03 | | |
| Sucrose | 30000 | 2500 | | 30000 | |
| ZnSO₄•7H₂O | 1 | 2 | 1 | 1 | 1 |
| Tween-80 (microliter/L) | | | 10 | | 10 |
| Inositol | 1000 | 100 | 100 | 1000 | 100 |
| Nicotinamide | | 1 | | | |
| Nicotinic acid | 5 | | 1 | 5 | 1 |
| Pyridoxine•HCl | 0.5 | 1 | 1 | 0.5 | 1 |
| Thiamine•HCl | 5 | 1 | 1 | 5 | 1 |

* Sources for basal media:
SH—Schenk and Hildebrandt, Can. J. Bot. 50: 199 (1971).
8p—Kao and Michayluk, Planta 126: 105 (1975).
P2—SH but with hormones from Potrykus et al., Mol. Gen. Genet. 156: 347 (1977).
PIM—Chupeau et al., The Plant Cell 25: 2444 (2013).

### Example 3

[0251] This example illustrates culture conditions effective in improving viability of plant cells or plant protoplasts. More specifically, this non-limiting example describes methods for encapsulating isolated plant protoplasts.

[0252] When protoplasts are encapsulated in alginate or pectin, they remain intact far longer than they would in an equivalent liquid medium. In order to encapsulate protoplasts, a liquid medium (“calcium base”) is prepared that is in all other respects identical to the final desired recipe with the exception that the calcium (usually CaCl2·2H2O) is increased to 80 millimolar. A second medium (“encapsulation base”) is prepared that has no added calcium but contains 10 g/L of the encapsulation agent, e. g., by making a 20 g/L solution of the encapsulation agent and adjusting its pH with KOH or NaOH until it is about 5.8, making a 2× solution of the final medium (with no calcium), then combining these two solutions in a 1:1 ratio. Encapsulation agents include alginate (e. g., alginic acid from brown algae, catalogue number A0682, Sigma-Aldrich, St. Louis. MO) and pectin (e. g., pectin from citrus peel, catalogue number P9136, Sigma-Aldrich, St. Louis, MO; various pectins including non-amidated low-methoxyl pectin, catalogue number 1120-50 from Modernist Pantry, Portsmouth, NH). The solutions, including the encapsulation base solution, is filter-sterilized through a series of filters, with the final filter being a 0.2-micrometer filter. Protoplasts are pelleted by gentle centrifugation and resuspended in the encapsulation base; the resulting suspension is added dropwise to the calcium base, upon which the protoplasts are immediately encapsulated in solid beads.

### Example 4

[0253] This example illustrates culture conditions effective in improving viability of plant cells or plant protoplasts. More specifically, this non-limiting example describes observations of effects on protoplast viability obtained by adding non-conventionally high levels of divalent cations to culture media.

[0254] Typical plant cell or plant protoplast media contain between about 2 to about 4 millimolar calcium cations and between about 1-1.5 millimolar magnesium cations. In the course of experiments varying and adding components to media, it was discovered that the addition of non-conventionally high levels of divalent cations had a surprisingly beneficial effect on plant cell or plant protoplast viability. Beneficial effects on plant protoplast viability begin to be seen when the culture medium contains about 30 millimolar calcium cations (e. g., as calcium chloride) or about 30 millimolar magnesium cations (e. g., as magnesium chloride). Even higher levels of plant protoplast viability were observed with increasing concentrations of calcium or magnesium cations, i. e., at about 40 millimolar or about 50 millimolar calcium or magnesium cations. The result of several titration experiments indicated that greatest improvement in protoplast viability was seen using media containing between about 50 to about 100 millimolar calcium cations or 50 to about 100 millimolar magnesium cations; no negative effects on protoplast viability or physical appearance was observed at these high cation levels. This was observed in multiple experiments using protoplasts obtained from several plant species including maize (multiple germplasms, e. g., B73, A188, B104, HiIIA, HiIIB, BMS), rice, wheat, soy, kale, and strawberry; improved protoplast viability was observed in both encapsulated protoplasts and non-encapsulated protoplasts. Addition of potassium chloride at the same levels had no effect on protoplast viability. It is possible that inclusion of slightly lower (but still non-conventionally high) levels of divalent cations (e. g., about 10 millimolar, about 15 millimolar, about 20 millimolar, or about 25 millimolar calcium cations or magnesium cations) in media is beneficial for plant cells or plant protoplasts of additional plant species.

### Example 5

[0255] This example illustrates culture conditions effective in improving viability of plant cells or plant protoplasts. More specifically, this non-limiting example describes observations of effects on maize, soybean, and strawberry protoplast viability obtained by adding non-conventionally high levels of divalent cations to culture media.

[0256] Separate suspensions of maize B73, winter wheat, soy, and strawberry protoplasts (2×10\hat{ }5 cells per milliliter) were prepared in YPIM B-liquid medium containing calcium chloride at 0, 50, or 100 millimolar. One-half milliliter aliquots of the suspensions were dispensed into a 24-well microtiter plate.

[0257] Viability at day 8 of culture was judged by visualization under a light microscope. At this point, the viability of the maize protoplasts in the 0, 50, and 100 millimolar calcium conditions was 10%, 30%, and 80%, respectively. There were no large differences observed at this time point for protoplasts of the other species.

[0258] Viability at day 13 was judged by Evans blue staining and visualization under a light microscope. At this point, the viability of the maize protoplasts in the 0, 50, and 100 millimolar calcium conditions was 0%, 0%, and 10%, respectively; viability of the soybean protoplasts in the 0, 50, and 100 millimolar calcium conditions was 0%, 50%, and 50%, respectively; and viability of the maize protoplasts in the 0 and 50 millimolar calcium conditions was 0% and 50%, respectively (viability was not measured for the 100 millimolar condition). These results demonstrate that culture conditions including calcium cations at 50 or 100 millimolar improved viability of both monocot and dicot protoplasts over a culture time of ˜13 days.

### Example 6

[0259] This example illustrates a method of delivery of an effector molecule to a plant cell or plant protoplast to effect a genetic change, in this case introduction of a double-strand break in the genome. More specifically, this non-limiting example describes a method of delivering a guide RNA (gRNA) in the form of a ribonucleoprotein (RNP) to isolated plant protoplasts.

[0260] The following delivery protocol (modified from one publicly available at molbio[dot]mgh[dot]harvard.edu/sheenweb/protocols_reg[dot]html) is generally suitable for use with monocot plants such as maize (Zea mays) and rice (Oryza sativa):

[0261] Prepare a polyethylene glycol (PEG) solution containing 40% PEG 4000, 0.2 molar mannitol, and 0.1 molar CaCl₂. Prepare an incubation solution containing 170 milligram/liter KH₂PO₄, 440 milligram/liter CaCl₂·2H₂O, 505 milligram/liter KNO₃, 160 milligram/liter NH₄NO₃, 370 milligram/liter MgSO₄·7H₂O, 0.01 milligram/liter KI, 1 milligram/liter H₃BO₃, 0.1 milligram/liter MnSO₄·4H₂O, 1 milligram/liter ZnSO₄·7H₂O, 0.03 milligram/liter CuSO₄·5H₂O, 1 milligram/liter nicotinic acid, 1 milligram/liter thiamine HCl, 1 milligram/liter pyridoxine HCl, 0.2 milligram/liter folic acid, 0.01 milligram/liter biotin, 1 milligram/liter D-Ca-pantothenate, 100 milligram/liter myo-inositol, 40 grams/liter glucose, 60 grams/liter mannitol, 700 milligram/liter MES, 10 microliter/liter Tween 80, 1 milligram/liter 2,4-D, and 1 milligram/liter 6-benzylaminopurine (BAP); adjust pH to 5.6.

[0262] Prepare a crRNA:tracrRNA or guide RNA (gRNA) complex by mixing equal amounts of CRISPR crRNA and tracrRNA (obtainable e. g., as custom-synthesized Alt-R™ CRISPR crRNA and tracrRNA oligonucleotides from Integrated DNA Technologies, Coralville, IA): mix 6 microliters of 100 micromolar crRNA and 6 microliters of 100 micromolar tracrRNA, heat at 95 degrees Celsius for 5 minutes, and then cool the crRNA:tracrRNA complex to room temperature. To the cooled gRNA solution, add 10 micrograms Cas9 nuclease (Aldevron, Fargo, ND) and incubate 5 minutes at room temperature to allow the ribonucleoprotein (RNP) complex to form. Add the RNP solution to 100 microliters of monocot protoplasts (prepared as described in Example 1) in a microfuge tube; add 5 micrograms salmon sperm DNA (VWR Cat. No.: 95037-160) and an equal volume of the PEG solution. Mix gently by tapping. After 5 minutes, dilute with 880 microliters of washing buffer and mix gently by inverting the tube. Centrifuge 1 minute at 1200 rpm and then remove the supernatant. Resuspend the protoplasts in 1 milliliter incubation solution and transfer to a multi-well plate. The efficiency of genome editing is assessed by any suitable method such as heteroduplex cleavage assay or by sequencing, as described elsewhere in this disclosure.

[0263] The following delivery protocol (modified from one described by Niu and Sheen (2012) Methods Mol. Biol., 876:195-206, doi: 10.1007/978-1-61779-809-2_16) is generally suitable for use with dicot plants such as Arabidopsis thaliana and brassicas such as kale (Brassica oleracea):

[0264] Prepare a polyethylene glycol (PEG) solution containing 40% PEG 4000, 0.2 molar mannitol, and 0.1 molar CaCl₂. Prepare an incubation solution containing 170 milligram/liter KH₂PO₄, 440 milligram/liter CaCl₂·2H₂O. 505 milligram/liter KNO₃, 160 milligram/liter NH₄NO₃, 370 milligram/liter MgSO₄·7H₂O, 0.01 milligram/liter KI, 1 milligram/liter H₃BO₃, 0.1 milligram/liter MnSO₄·4H₂O, 1 milligram/liter ZnSO₄·7H₂O, 0.03 milligram/liter CuSO₄·5H₂O, 1 milligram/liter nicotinic acid, 1 milligram/liter thiamine HCl, 1 milligram/liter pyridoxine HCl, 0.2 milligram/liter folic acid, 0.01 milligram/liter biotin, 1 milligram/liter D-Ca-pantothenate, 100 milligram/liter myo-inositol, 40 grams/liter glucose, 60 grams/liter mannitol, 700 milligram/liter MES, 10 microliter/liter Tween 80, 1 milligram/liter 2,4-D, and 1 milligram/liter 6-benzylaminopurine (BAP); adjust pH to 5.6.

[0265] Prepare a crRNA:tracrRNA or guide RNA (gRNA) complex by mixing equal amounts of CRISPR crRNA and tracrRNA (obtainable e. g., as custom-synthesized Alt-R™ CRISPR crRNA and tracrRNA oligonucleotides from Integrated DNA Technologies, Coralville, IA): mix 6 microliters of 100 micromolar crRNA and 6 microliters of 100 micromolar tracrRNA, heat at 95 degrees Celsius for 5 minutes, and then cool the crRNA:tracrRNA complex to room temperature. To the cooled gRNA solution, add 10 micrograms Cas9 nuclease (Aldevron, Fargo, ND) and incubate 5 minutes at room temperature to allow the ribonucleoprotein (RNP) complex to form. Add the RNP solution to 100 microliters of dicot protoplasts (prepared as described in Example 1) in a microfuge tube; add 5 micrograms salmon sperm DNA (VWR Cat. No.: 95037-160) and an equal volume of the PEG solution. Mix gently by tapping. After 5 minutes, dilute with 880 microliters of washing buffer and mix gently by inverting the tube. Centrifuge 1 minute at 1200 rpm and then remove the supernatant. Resuspend the protoplasts in 1 milliliter incubation solution and transfer to a multi-well plate. The efficiency of genome editing is assessed by any suitable method such as heteroduplex cleavage assay or by sequencing, as described elsewhere in this disclosure.

[0266] The above protocols for delivery of gRNAs as RNPs to plant protoplasts are adapted for delivery of guide RNAs alone to monocot or dicot protoplasts that express Cas9 nuclease by transient or stable transformation; in this case, the guide RNA complex is prepared as before and added to the protoplasts, but no Cas9 nuclease and no salmon sperm DNA is added. The remainder of the procedures are identical.

### Example 7

[0267] This example illustrates genome editing in plants and further illustrates a method of delivering gene-editing effector molecules into a plant cell. This example describes introducing at least one double-strand break (DSB) in a genome in a plant cell or plant protoplast, by delivering at least one effector molecules to the plant cell or plant protoplast using at least one physical agent, such as a particulate, microparticulate, or nanoparticulate. More specifically, this non-limiting example illustrates introducing at least one double-strand break (DSB) in a genome in a plant cell or plant protoplast by contacting the plant cell or plant protoplast with a composition including at least one sequence-specific nuclease and at least one physical agent, such as at least one nanocarrier. Embodiments include those wherein the nanocarrier comprises metals (e. g., gold, silver, tungsten, iron, cerium), ceramics (e. g., aluminum oxide, silicon carbide, silicon nitride, tungsten carbide), polymers (e. g., polystyrene, polydiacetylene, and poly(3,4-ethylenedioxythiophene) hydrate), semiconductors (e. g., quantum dots), silicon (e. g., silicon carbide), carbon (e. g., graphite, graphene, graphene oxide, or carbon nanosheets, nanocomplexes, or nanotubes), composites (e. g., polyvinylcarbazole/graphene, polystyrene/graphene, platinum/graphene, palladium/graphene nanocomposites), a polynucleotide, a poly(AT), a polysaccharide (e. g., dextran, chitosan, pectin, hyaluronic acid, and hydroxyethylcellulose), a polypeptide, or a combination of these. In embodiments, such particulates and nanoparticulates are further covalently or non-covalently functionalized, or further include modifiers or cross-linked materials such as polymers (e. g., linear or branched polyethylenimine, poly-lysine), polynucleotides (e. g., DNA or RNA), polysaccharides, lipids, polyglycols (e. g., polyethylene glycol, thiolated polyethylene glycol), polypeptides or proteins, and detectable labels (e. g., a fluorophore, an antigen, an antibody, or a quantum dot). Embodiments include those wherein the nanocarrier is a nanotube, a carbon nanotube, a multi-walled carbon nanotube, or a single-walled carbon nanotube. Specific nanocarrier embodiments contemplated herein include the single-walled carbon nanotubes, cerium oxide nanoparticles (“nanoceria”), and modifications thereof (e. g., with cationic, anionic, or lipid coatings) described in Giraldo et al. (2014) Nature Materials. 13:400-409; the single-walled carbon nanotubes and heteropolymer complexes thereof described in Zhang et al. (2013) Nature Nanotechnol., 8:959-968 (doi:10.1038/NNANO.2013.236); the single-walled carbon nanotubes and heteropolymer complexes thereof described in Wong et al. (2016) Nano Lett., 16:1161-1172; and the various carbon nanotube preparations described in US Patent Application Publication US 2015/0047074 and International Patent Application PCT/US2015/050885 (published as WO 2016/044698 and claiming priority to U.S. Provisional Patent Application 62/052,767), all of which patent applications are incorporated in their entirety by reference herein. See also, for example, the various types of particles and nanoparticles, their preparation, and methods for their use, e. g., in delivering polynucleotides and polypeptides to cells, disclosed in US Patent Application Publications 2010/0311168, 2012/0023619, 2012/0244569, 2013/0145488, 2013/0185823, 2014/0096284, 2015/0040268, 2015/0047074, and 2015/0208663, all of which are incorporated herein by reference in their entirety.

[0268] In these examples, single-walled carbon nanotubes (SWCNT) and modifications thereof are prepared as described in Giraldo et al. (2014) Nature Materials. 13:400-409; Zhang et al. (2013) Nature Nanotechnol., 8:959-968; Wong et al. (2016) Nano Lett., 16:1161-1172; US Patent Application Publication US 2015/0047074; and International Patent Application PCT/US2015/050885 (published as WO 2016/044698). In an initial experiment, a DNA plasmid encoding green fluorescent protein (GFP) as a reporter is non-covalently complexed with a SWCNT preparation and tested on various plant cell preparations including plant cells in suspension culture, plant callus, plant embryos, intact or half seeds, and shoot apical meristem. Delivery to the plant callus, embryos, seeds, and meristem is by treatment with pressure, centrifugation, bombardment, microinjection, infiltration (e. g., with a syringe), or by direct application to the surface of the plant tissue. Efficiency of the SWCNT delivery of GFP across the plant cell wall and the cellular localization of the GFP signal is evaluated by microscopy.

[0269] In another experiment, plasmids encoding Cas9 and at least one guide RNA (gRNA), such as those described in Example 6, are non-covalently complexed with a SWCNT preparation and tested on various plant cell preparations including plant cells in suspension culture, plant callus, plant embryos, intact or half seeds, and shoot apical meristem. Delivery to the plant callus, embryos, seeds, and meristem is by treatment with pressure, centrifugation, bombardment, microinjection, infiltration (e. g., with a syringe), or by direct application to the surface of the plant tissue. The gRNA is designed to target the endogenous plant gene phytoene desaturase (PDS) for silencing, where PDS silencing produces a visible phenotype (bleaching, or low/no chlorophyll).

[0270] In another experiment. RNA encoding Cas9 and at least one guide RNA (gRNA), such as those described in Example 6, are non-covalently complexed with a SWCNT preparation and tested on various plant cell preparations including plant cells in suspension culture, plant callus, plant embryos, intact or half seeds, and shoot apical meristem. Delivery to the plant callus, embryos, seeds, and meristem is by treatment with pressure, centrifugation, bombardment, microinjection, infiltration (e. g., with a syringe), or by direct application to the surface of the plant tissue. The gRNA is designed to target the endogenous plant gene phytoene desaturase (PDS) for silencing, where PDS silencing produces a visible phenotype (bleaching, or low/no chlorophyll).

[0271] In another experiment, a ribonucleoprotein (RNP), prepared by complexation of Cas9 nuclease and at least one guide RNA (gRNA), is non-covalently complexed with a SWCNT preparation and tested on various plant cell preparations including plant cells in suspension culture, plant callus, plant embryos, intact or half seeds, and shoot apical meristem. Delivery to the plant callus, embryos, seeds, and meristem is by treatment with pressure, centrifugation, bombardment, microinjection, infiltration (e. g., with a syringe), or by direct application to the surface of the plant tissue. The gRNA is designed to target the endogenous plant gene phytoene desaturase (PDS) for silencing, where PDS silencing produces a visible phenotype (bleaching, or low/no chlorophyll).

[0272] One of skill in the art would recognize that the above general compositions and procedures can be modified or combined with other reagents and treatments, such as those described in detail in the paragraphs following the heading “Delivery Methods and Delivery Agents”. In addition, the single-walled carbon nanotubes (SWCNT) and modifications thereof prepared as described in Giraldo et al. (2014) Nature Materials, 13:400-409; Zhang et al. (2013) Nature Nanotechnol., 8:959-968; Wong et al. (2016) Nano Lett., 16:1161-1172; US Patent Application Publication US 2015/0047074; and International Patent Application PCT/US2015/050885 (published as WO 2016/044698) can be used to prepare complexes with other polypeptides or polynucleotides or a combination of polypeptides and polynucleotides (e. g., with one or more polypeptides or ribonucleoproteins including at least one functional domain selected from the group consisting of: transposase domains, integrase domains, recombinase domains, resolvase domains, invertase domains, protease domains, DNA methyltransferase domains, DNA hydroxylmethylase domains, DNA demethylase domains, histone acetylase domains, histone deacetylase domains, nuclease domains, repressor domains, activator domains, nuclear-localization signal domains, transcription-regulatory protein (or transcription complex recruiting) domains, cellular uptake activity associated domains, nucleic acid binding domains, antibody presentation domains, histone modifying enzymes, recruiter of histone modifying enzymes, inhibitor of histone modifying enzymes, histone methyltransferases, histone demethylases, histone kinases, histone phosphatases, histone ribosylases, histone deribosylases, histone ubiquitinases, histone deubiquitinases, histone biotinases, and histone tail proteases).

### Example 8

[0273] This example illustrates genome editing in plants and further illustrates a method of delivering gene-editing effector molecules into a plant cell. More specifically, this non-limiting example describes introducing at least one double-strand break (DSB) in a genome in a plant cell or plant protoplast, by contacting the plant cell or plant protoplast with a composition including a sequence-specific nuclease complexed with a gold nanoparticle.

[0274] In embodiments, at least one double-strand break (DSB) is introduced in a genome in a plant cell or plant protoplast, by contacting the plant cell or plant protoplast with a composition that includes a charge-modified sequence-specific nuclease complexed to a charge-modified gold nanoparticle, wherein the complexation is non-covalent, e. g., through ionic or electrostatic interactions. In an embodiment, a sequence-specific nuclease having at least one region bearing a positive charge forms a complex with a negatively-charged gold particle; in another embodiment, a sequence-specific nuclease having at least one region bearing a negative charge forms a complex with a positively-charged gold particle. Any suitable method can be used for modifying the charge of the nuclease or the nanoparticle, for instance, through covalent modification to add functional groups, or non-covalent modification (e. g., by coating a nanoparticle with a cationic, anionic, or lipid coating). In embodiments, the sequence-specific nuclease is a type II Cas nuclease having at least one modification selected from the group consisting of: (a) modification at the N-terminus with at least one negatively charged moiety; (b) modification at the N-terminus with at least one moiety carrying a carboxylate functional group; (c) modification at the N-terminus with at least one glutamate residue, at least one aspartate residue, or a combination of glutamate and aspartate residues; (d) modification at the C-terminus with a localization signal, transit, or targeting peptide; (e) modification at the C-terminus with a nuclear localization signal (NLS), a chloroplast transit peptide (CTP), or a mitochondrial targeting peptide (MTP). In embodiments, the type II Cas nuclease is a Cas9 from Streptococcus pyogenes wherein the Cas9 is modified at the N-terminus with at least one negatively charged moiety and modified at the C-terminus with a nuclear localization signal (NLS), a chloroplast transit peptide (CTP), or a mitochondrial targeting peptide (MTP). In embodiments, the type 11 Cas nuclease is a Cas9 from Streptococcus pyogenes wherein the Cas9 is modified at the N-terminus with a polyglutamate peptide and modified at the C-terminus with a nuclear localization signal (NLS). In embodiments, the gold nanoparticle has at least one modification selected from the group consisting of: (a) modification with positively charged moieties; (b) modification with at least one moiety carrying a positively charged amine; (c) modification with at least one polyamine; (d) modification with at least one lysine residue, at least one histidine residue, at least one arginine residue, at least one guanidine, or a combination thereof. Specific embodiments include those wherein: (a) the sequence-specific nuclease is a type II Cas nuclease modified at the N-terminus with at least one negatively charged moiety and modified at the C-terminus with a nuclear localization signal (NLS), a chloroplast transit peptide (CTP), or a mitochondrial targeting peptide (MTP); and the gold nanoparticle is modified with at least one positively charged moiety; (b) the type II Cas nuclease is a Cas9 from Streptococcus pyogenes modified at the N-terminus with a polyglutamate peptide and modified at the C-terminus with a nuclear localization signal (NLS); and the gold nanoparticle is modified with at least one at least one lysine residue, at least one histidine residue, at least one arginine residue, at least one guanidine, or a combination thereof; (c) the type II Cas nuclease is a Cas9 from Streptococcus pyogenes modified at the N-terminus with a polyglutamate peptide that includes at least 15 glutamate residues and modified at the C-terminus with a nuclear localization signal (NLS); and wherein the gold nanoparticle is modified with at least one at least one lysine residue, at least one histidine residue, at least one arginine residue, at least one guanidine, or a combination thereof. In a specific embodiment, at least one double-strand break (DSB) is introduced in a genome in a plant cell or plant protoplast, by contacting the plant cell or plant protoplast with a composition including a sequence-specific nuclease complexed with a gold nanoparticle, wherein the sequence-specific nuclease is a Cas9 from Streptococcus pyogenes modified at the N-terminus with a polyglutamate peptide that includes at least 15 glutamate residues and modified at the C-terminus with a nuclear localization signal (NLS); and wherein the gold nanoparticle is in the form of cationic arginine gold nanoparticles (ArgNPs), and wherein when the modified Cas9 and the ArgNPs are mixed, self-assembled nanoassemblies are formed as described in Mout et al. (2017) ACS Nano, doi:10.1021/acsnano.6b07600. Other embodiments contemplated herein include the various nanoparticle-protein complexes (e. g., amine-bearing nanoparticles complexed with carboxylate-bearing proteins) described in International Patent Application PCT/US2016/015711, published as International Patent Application Publication WO2016/123514, which claims priority to U.S. Provisional Patent Applications 62/109,389, 62/132,798, and 62/169,805, all of which patent applications are incorporated in their entirety by reference herein.

[0275] In embodiments, the sequence-specific nuclease is an RNA-guided DNA endonuclease, such as a type II Cas nuclease, and the composition further includes at least one guide RNA (gRNA) for an RNA-guided nuclease, or a DNA encoding a gRNA for an RNA-guided nuclease. The method effects the introduction of at least one double-strand break (DSB) in a genome in a plant cell or plant protoplast; in embodiments, the genome is that of the plant cell or plant protoplast; in embodiments, the genome is that of a nucleus, mitochondrion, plastid, or endosymbiont in the plant cell or plant protoplast. In embodiments, the at least one double-strand break (DSB) is introduced into coding sequence, non-coding sequence, or a combination of coding and non-coding sequence. In embodiments, the plant cell or plant protoplast is a plant cell in an intact plant or seedling or plantlet, a plant tissue, seed, embryo, meristem, germline cells, callus, or a suspension of plant cells or plant protoplasts.

[0276] In embodiments, at least one dsDNA molecule is also provided to the plant cell or plant protoplast, and is integrated at the site of at least one DSB or at the location where genomic sequence is deleted between two DSBs. Embodiments include those wherein: (a) the at least one DSB is two blunt-ended DSBs, resulting in deletion of genomic sequence between the two blunt-ended DSBs, and wherein the dsDNA molecule is blunt-ended and is integrated into the genome between the two blunt-ended DSBs; (b) the at least one DSB is two DSBs, wherein the first DSB is blunt-ended and the second DSB has an overhang, resulting in deletion of genomic sequence between the two DSBs, and wherein the dsDNA molecule is blunt-ended at one terminus and has an overhang on the other terminus, and is integrated into the genome between the two DSBs; (c) the at least one DSB is two DSBs, each having an overhang, resulting in deletion of genomic sequence between the two DSBs, and wherein the dsDNA molecule has an overhang at each terminus and is integrated into the genome between the two DSBs.

[0277] In a non-limiting example, self-assembled green fluorescent protein (GFP)/cationic arginine gold nanoparticles (ArgNPs), nanoassemblies are prepared as described in International Patent Application Publication WO2016/123514. The GFP/ArgNP nanoassemblies are delivered to maize protoplasts and to kale protoplasts prepared as described in Example 1, and to protoplasts prepared from the Black Mexican Sweet (BMS) maize cell line. Efficiency of transfection or delivery is assessed by fluorescence microscopy at time points after transfection (30 minutes, 1 hour, 3 hours, 6 hours, and overnight).

[0278] In a non-limiting example, self-assembled GFP/cationic arginine gold nanoparticles (ArgNPs), nanoassemblies are prepared as described in International Patent Application Publication WO2016/123514. The GFP/ArgNP nanoassemblies are co-incubated with plant cells in suspension culture. Efficiency of transfection or delivery across the plant cell wall is assessed by fluorescence microscopy at time points after transfection (30 minutes, 1 hour, 3 hours, 6 hours, and overnight).

[0279] In a non-limiting example, self-assembled GFP/cationic arginine gold nanoparticles (ArgNPs), nanoassemblies are prepared as described in International Patent Application Publication WO2016/123514. The GFP/ArgNP nanoassemblies are further prepared for Biolistics or particle bombardment and thus delivered to plant cells from suspension cultures transferred to semi-solid or solid media, as well as to soybean embryogenic callus. Efficiency of transfection or delivery across the plant cell wall is assessed by fluorescence microscopy at time points after transfection (30 minutes, 1 hour, 3 hours, 6 hours, and overnight).

[0280] In a non-limiting example, self-assembled GFP/cationic arginine gold nanoparticles (ArgNPs), nanoassemblies are prepared as described in International Patent Application Publication WO2016/123514. The GFP/ArgNP nanoassemblies are delivered by infiltration (e. g., using mild positive pressure or negative pressure) into leaves of Arabidopsis thaliana plants. Efficiency of transfection or delivery across the plant cell wall is assessed by fluorescence microscopy at time points after transfection (30 minutes, 1 hour, 3 hours, 6 hours, and overnight).

[0281] In a non-limiting example, self-assembled Cas9/ArgNP nanoassemblies are prepared as described in Mout et al. (2017) ACS Nano, doi:10.1021/acsnano.6b07600 or alternatively as described in International Patent Application Publication WO2016/123514, by mixing a Cas9 from Streptococcus pyogenes modified at the N-terminus with a polyglutamate peptide that includes at least 15 glutamate residues and modified at the C-terminus with a nuclear localization signal (NLS) with cationic arginine gold nanoparticles (ArgNPs). The Cas9/ArgNP nanoassemblies are delivered to maize protoplasts or to kale protoplasts prepared as described in Example 1, and to protoplasts prepared from the Black Mexican Sweet (BMS) maize cell line. In one variation of the procedure, the Cas9/ArgNP nanoassemblies are co-delivered with at least one guide RNA (such as those described in Examples, 4, 5, 8, 9, 10, 12, and 13) to the protoplasts. In other variations of the procedure, the self-assembled Cas9/ArgNP nanoassemblies are prepared with at least one guide RNA to allow the modified Cas9 to form a ribonucleoprotein (RNP) either prior to or after formation of the nanoassemblies; the self-assembled RNP/ArgNP nanoassemblies are then delivered to the protoplasts. Efficiency of editing is assessed by any suitable method such as a heteroduplex cleavage assay or by sequencing, as described elsewhere in this disclosure.

[0282] In a non-limiting example, self-assembled Cas9/ArgNP nanoassemblies are prepared as described in Mout et al. (2017) ACS Nano, doi:10.1021/acsnano.6b07600 or alternatively as described in International Patent Application Publication WO2016/123514, by mixing a Cas9 from Streptococcus pyogenes modified at the N-terminus with a polyglutamate peptide that includes at least 15 glutamate residues and modified at the C-terminus with a nuclear localization signal (NLS) with cationic arginine gold nanoparticles (ArgNPs). The Cas9/ArgNP nanoassemblies are co-incubated with plant cells in suspension culture. In one variation of the procedure, the Cas9/ArgNP nanoassemblies are co-delivered with at least one guide RNA (such as those described in Examples, 4, 5, 8, 9, 10, 12, and 13) to the plant cells in suspension culture. In other variations of the procedure, the self-assembled Cas9/ArgNP nanoassemblies are prepared with at least one guide RNA to allow the modified Cas9 to form a ribonucleoprotein (RNP) either prior to or after formation of the nanoassemblies; the self-assembled RNP/ArgNP nanoassemblies are then delivered to the plant cells in suspension culture. Efficiency of editing is assessed by any suitable method such as a heteroduplex cleavage assay or by sequencing, as described elsewhere in this disclosure.

[0283] In a non-limiting example, self-assembled Cas9/ArgNP nanoassemblies are prepared as described in Mout et al. (2017) ACS Nano, doi:10.1021/acsnano.6b07600 or alternatively as described in International Patent Application Publication WO2016/123514, by mixing a Cas9 from Streptococcus pyogenes modified at the N-terminus with a polyglutamate peptide that includes at least 15 glutamate residues and modified at the C-terminus with a nuclear localization signal (NLS) with cationic arginine gold nanoparticles (ArgNPs). The Cas9/ArgNP nanoassemblies are further prepared for Biolistics or particle bombardment and thus delivered to plant cells from suspension cultures transferred to semi-solid or solid media, as well as to soybean embryogenic callus. In one variation of the procedure, the Cas9/ArgNP nanoassemblies are co-delivered with at least one guide RNA (such as those described in Examples, 4, 5, 8, 9, 10, 12, and 13) to the plant cells or callus. In other variations of the procedure, the self-assembled Cas9/ArgNP nanoassemblies are prepared with at least one guide RNA to allow the modified Cas9 to form a ribonucleoprotein (RNP) either prior to or after formation of the nanoassemblies; the self-assembled RNP/ArgNP nanoassemblies are then delivered to the plant cells or callus. Efficiency of editing is assessed by any suitable method such as a heteroduplex cleavage assay or by sequencing, as described elsewhere in this disclosure.

[0284] In a non-limiting example, self-assembled Cas9/ArgNP nanoassemblies are prepared as described in Mout et al. (2017) ACS Nano, doi:10.1021/acsnano.6b07600 or alternatively as described in International Patent Application Publication WO2016/123514, by mixing a Cas9 from Streptococcus pyogenes modified at the N-terminus with a polyglutamate peptide that includes at least 15 glutamate residues and modified at the C-terminus with a nuclear localization signal (NLS) with cationic arginine gold nanoparticles (ArgNPs). The Cas9/ArgNP nanoassemblies are delivered by infiltration (e. g., using mild positive pressure or negative pressure) into leaves of Arabidopsis thaliana plants. In one variation of the procedure, the Cas9/ArgNP nanoassemblies are co-delivered with at least one guide RNA (such as those described in Examples, 4, 5, 8, 9, 10, 12, and 13) to the Arabidopsis leaves. In other variations of the procedure, the self-assembled Cas9/ArgNP nanoassemblies are prepared with at least one guide RNA to allow the modified Cas9 to form a ribonucleoprotein (RNP) either prior to or after formation of the nanoassemblies; the self-assembled RNP/ArgNP nanoassemblies are then delivered to the Arabidopsis leaves. Efficiency of editing is assessed by any suitable method such as a heteroduplex cleavage assay or by sequencing, as described elsewhere in this disclosure.

[0285] One of skill in the art would recognize that alternatives to the above compositions and procedures can be used to edit plant cells and intact plants, tissues, seeds, and callus. In embodiments, nanoassemblies are made using other sequence-specific nucleases (e. g., zinc-finger nucleases (ZFNs), transcription activator-like effector nucleases (TAL-effector nucleases or TALENs), Argonaute proteins, or a meganuclease or engineered meganuclease) which can be similarly charge-modified. In embodiments, nanoassemblies are made using other nanoparticles (e. g., nanoparticles made of materials such as carbon, silicon, silicon carbide, gold, tungsten, polymers, ceramics, iron oxide, or cobalt ferrite) which can be similarly charge-modified in order to form non-covalent complexes with the charge-modified sequence-specific nuclease. Similar nanoassemblies including other polypeptides (e. g., phosphatases, hydrolases, oxidoreductases, transferases, lyases, recombinases, polymerases, ligases, and isomerases) or polynucleotides or a combination of polypeptides and polynucleotides are made using similar charge modification methods to enable non-covalent complexation with charge-modified nanoparticles. For example, similar nanoassemblies are made by complexing charge-modified nanoparticles with one or more polypeptides or ribonucleoproteins including at least one functional domain selected from the group consisting of: transposase domains, integrase domains, recombinase domains, resolvase domains, invertase domains, protease domains, DNA methyltransferase domains, DNA hydroxylmethylase domains, DNA demethylase domains, histone acetylase domains, histone deacetylase domains, nuclease domains, repressor domains, activator domains, nuclear-localization signal domains, transcription-regulatory protein (or transcription complex recruiting) domains, cellular uptake activity associated domains, nucleic acid binding domains, antibody presentation domains, histone modifying enzymes, recruiter of histone modifying enzymes, inhibitor of histone modifying enzymes, histone methyltransferases, histone demethylases, histone kinases, histone phosphatases, histone ribosylases, histone deribosylases, histone ubiquitinases, histone deubiquitinases, histone biotinases, and histone tail proteases.

### Example 9

[0286] As described herein, microinjection techniques can be used as an alternative to the methods for delivering targeting agents to protoplasts as described, e.g., in certain Examples above. Microinjection is typically used to target specific cells in isolated embryo sacs or the shoot apical meristem. See, e.g., U.S. Pat. No. 6,300,543, incorporated by reference herein. For example, an injector attached to a Narashige manipulator on a dissecting microscope is adequate because the cells to be microinjected are relatively large (e.g., the egg/synergids/zygote and the central cell). For smaller cells, such as those of the embryo, a compound, inverted microscope with an attached Narashige manipulator is used. Injection pipette diameter and bevel are also important. Use a high quality pipette puller and beveler to prepare needles with adequate strength, flexibility and pore diameter. These will vary depending on the cargo being delivered to cells. The volume of fluid to be microinjected must be exceedingly small and must be carefully controlled. An Eppendorf Transjector yields consistent results (Laurie et al., 1999).

[0287] The genetic cargo can be RNA, DNA, protein or a combination thereof. The cargo can be designed to change one aspect of the target genome or many. The concentration of each cargo component will vary depending on the nature of the manipulation. Typical cargo volumes can vary from 2-20 nanoliters. After microinjection the embryos are maintained on an appropriate media alone (e.g., sterile MS medium with 10% sucrose) or supplemented with a feeder culture. Plantlets are transferred to fresh MS media every two weeks and to larger containers as they grow. Plantlets with a well-developed root system are transferred to soil and maintained in high-humidity for 5 days to acclimate. Plants are gradually exposed to the air and cultivated to reproductive maturity.

[0288] Microinjection of corn embryos: The cobs and tassels are immediately bagged when they appear to prevent pollination. To obtain zygote-containing maize embryo sacs, hand pollination of silks is performed when the silks are 6-10 cm long, the pollinated ears are bagged and tassels removed, and then ears are harvested at 16 hours later. After removing husks and silks, the cobs are cut transversely into 3 cm segments. The segments are surface sterilized in 70% ethanol and then rinsed in sterile distilled, deionized water. Ovaries are then removed and prepared for sectioning. The initial preparation may include mechanical removal of the ovarian wall, but this may not be required.

[0289] Once the ovaries have been removed, they are attached to a Vibratome sectioning block, an instrument designed to produce histological sections without chemical fixation or embedment. The critical attachment step is accomplished using a commercial adhesive such as Locktite cement. Normally 2-3 pairs of ovaries are attached on each sterile sectioning block with the adaxial ovarian surface facing upwards and perpendicular to the longitudinal axis of the rectangular sectioning block (Laurie et al., In Vitro Cell Dev Biol., 35: 320-325, 1999). Ovarian sections (or “nucellar slabs”) are obtained at a thickness of 200 to 400 micrometers. Ideal section thickness is 200 micrometers. The embryo sac will remain viable if it is not cut. The sections are collected with fine forceps and evaluated on a dissecting microscope with basal illumination. Sections with an intact embryo sac are placed on semi-solid Murashige-Skoog (MS) culture medium (Campenot et al., 1992) containing 15% sucrose and 0.1 mg/L benzylaminopurine. Sterile Petriplates containing semi-solid MS medium and nucellar slabs are then placed in an incubator maintained at 26° C. These can be monitored visually by removing plates from the incubator and examining the nucellar slabs with a dissecting microscope in a laminar flow hood.

[0290] Microinjection of soybean embryonic axes: Mature soybean seeds are surface sterilized using chlorine gas. The gas is cleared by air flow in a sterile, laminar flow hood. Seeds are wetted with 70% ethanol for 30 seconds and rinsed with sterile distilled, deionized water then incubated in sterile distilled, deionized water for 30 minutes to 12 hours. The embryonic axes are carefully removed from the cotyledons and placed in MS media with the radicle oriented downwards and the apex exposed to air. The embryonic leaves are carefully removed with fine tweezers to expose the shoot apical meristem.

[0291] Microinjection of rice: Rice tissues that are appropriate for genome editing manipulation include embryogenic callus, exposed shoot apical meristems and 1 DAP embryos. There are many approaches to producing embryogenic callus (for example, Tahir 2010 (doi:10.1007/978-1-61737-988-8_21); Ge et al., 2006 (doi:10.1007/s00299-005-0100-7)). Shoot apical meristem explants can be prepared using a variety of methods in the art (see, e.g., Sticklen and Oraby, 2005 (doi:10.1079/IVP2004616); Baskaran and Dasgupta, 2012 doi:10.1007/s13562-011-0078-x)). This work describes how to prepare and nurture material that is adequate for microinjection.

[0292] To prepare 1 DAP embryos for microinjection, Indica or japonica rice are cultivated under ideal conditions in a greenhouse with supplemental lighting with a 13-hour day, day/night temperatures of 30°/20° C., relative humidity between 60-80%, and adequate fertigation using Hoagland's solution or an equivalent. The 1 DAP zygotes are identified and prepped essentially as described in Zhang et al., 1999, Plant Cell Reports (doi:10.1007/s002990050722). The dissected ovaries with exposed zygotes are placed on the appropriate solid support medium and oriented for easy access using a microinjection needle. Injection and subsequent growth is carried out as described above in this Example.

[0293] Microinjection of tomato; Tomato tissues that are appropriate for genome editing manipulation include embryogenic callus, exposed shoot apical meristems and 1 DAP embryos. There are many approaches to producing embryogenic callus (for example, Toyoda et al., 1988 (doi:10.1007/BF00269921), Tahir 2010 (DOI 10.1007/978-1-61737-988-8_21), Ge et al., 2006 (doi:10.1007/s00299-005-0100-7), Senapati, 2016 (doi:10.9734/ARRB/2016/22300)). Shoot apical meristem explants can be prepared using a variety of methods in the art (Sticklen and Oraby, 2005 (doi:10.1079/IVP2004616), Baskaran and Dasgupta, 2012 (doi:10.1007/s13562-011-0078-x), Senapati, 2016 (doi:10.9734/ARRB/2016/22300)). This work describes how to prepare and nurture material that is adequate for microinjection.

[0294] To prepare one day after germination seedlings for microinjection, tomato seed are germinated under ideal conditions in a growth chamber with supplemental lighting for a 16-hour day, day/night temperatures of 25/20° C., and relative humidity between 60-80%. The one day after germination seedlings are identified and prepped essentially as described in Vinoth et al., 2013 (doi:10.1007/s12010-012-0006-0). Germinated seeds with 2-3 mm meristems are placed on the appropriate solid support medium and oriented for easy access using a microinjection needle. Injection and subsequent growth is carried out as described above in this Example.

### Example 10

[0295] This example illustrates a method of changing expression of a sequence of interest in a genome, comprising integrating sequence encoded by a polynucleotide (such as a double-stranded DNA, a single-stranded DNA, a single-stranded DNA/RNA hybrid, or a double-stranded DNA/RNA hybrid) donor molecule at the site of at least one double-strand break (DSB) in a genome. More specifically, this non-limiting example illustrates using a ribonucleoprotein (RNP) including a guide RNA (gRNA) and a nuclease to effect a DSB in the genome of a plant, and integration of sequence encoded by a double-stranded DNA (dsDNA) at the site of the DSB, wherein the dsDNA molecule includes a sequence recognizable by a specific binding agent, and wherein contacting the integrated sequence encoded by dsDNA molecule with the specific binding agent results in a change of expression of a sequence of interest. In this particular example, the sequence recognizable by a specific binding agent includes a recombinase recognition site sequence, the specific binding agent is a site-specific recombinase, and the change of expression is upregulation or downregulation or expression of a transcript having an altered sequence (for example, expression of a transcript that has had a region of DNA excised, inverted, or translocated by the recombinase).

[0296] The loxP (“locus of cross-over”) recombinase recognition site and its corresponding recombinase Cre, were originally identified in the P1 bacteriophage. The wild-type loxP 34 base-pair sequence is ATAACTTCGTATAGCATACATTATACGAAGTTAT (SEQ ID NO:7) and includes two 13 base-pair palindromic sequences flanking an 8 base-pair spacer sequence; the spacer sequence, shown in underlined font, is asymmetric and provides directionality to the loxP site. Other useful loxP variants or recombinase recognition site sequence that function with Cre recombinase are provided in Table 2.

TABLE 2

| SEQ | | |
|---|---|---|
| ID | Cre recombinase | |
| NO: | recognition site | Sequence |
| 7 | LoxP (wild-type 1) | ATAACTTCGTATAGCAT |
| | | ACATTATACGAAGTTAT |
| 8 | LoxP (wild-type 2) | ATAACTTCGTATAATGT |
| | | ATGCTATACGAAGTTAT |
| 9 | Canonical LoxP | ATAACTTCGTATANNNT |
| | | ANNNTATACGAAGTTAT |
| 10 | Lox 511 | ATAACTTCGTATAATGT |
| | | ATACTATACGAAGTTAT |
| 11 | Lox 5171 | ATAACTTCGTATAATGT |
| | | GTACTATACGAAGTTAT |
| 12 | Lox 2272 | ATAACTTCGTATAAAGT |
| | | ATCCTATACGAAGTTAT |
| 13 | M2 | ATAACTTCGTATAAGAA |
| | | ACCATATACGAAGTTAT |
| 14 | M3 | ATAACTTCGTATATAAT |
| | | ACCATATACGAAGTTAT |
| 15 | M7 | ATAACTTCGTATAAGAT |
| | | AGAATATACGAAGTTAT |
| 16 | M11 | ATAACTTCGTATAAGAT |
| | | AGAATATACGAAGTTAT |
| 17 | Lox 71 | TACCGTTCGTATANNNT |
| | | ANNNTATACGAAGTTAT |
| 18 | Lox 66 | ATAACTTCGTATANNNT |
| | | ANNNTATACGAACGGTA |

[0297] Cre recombinase catalyzes the recombination between two compatible (non-heterospecific) loxP sites, which can be located either on the same or on separate DNA molecules. Thus, in embodiments of the disclosure, polynucleotide (such as double-stranded DNA, single-stranded DNA, single-stranded DNA/RNA hybrid, or double-stranded DNA/RNA hybrid) molecules including compatible recombinase recognition sites sequence are integrated at the site of two or more double-strand breaks (DSBs) in a genome, which can be on the same or on separate DNA molecules (such as chromosomes). Depending on the number of recombinase recognition sites, where these are integrated, and in what orientation, various results are achieved, such as expression of a transcript that has had a region of DNA excised, inverted, or translocated by the recombinase. For example, in the case where one pair of loxP sites (or any pair of compatible recombinase recognition sites) are integrated at the site of DSBs in the genome, if the loxP sites are on the same DNA molecule and integrated in the same orientation, the genomic sequence flanked by the loxP sites is excised, resulting in a deletion of that portion of the genome. If the loxP sites are on the same DNA molecule and integrated in opposite orientation, the genomic sequence flanked by the loxP sites is inverted. If the loxP sites are on separate DNA molecules, translocation of genomic sequence adjacent to the loxP site occurs. Examples of heterologous arrangements or integration patterns of recombinase recognition sites and methods for their use, particularly in plant breeding, are disclosed in U.S. Pat. No. 8,816,153 (see, for example, the Figures and working examples), the entire specification of which is incorporated herein by reference.

[0298] One of skill in the art would recognize that the details provided here are applicable to other recombinases and their corresponding recombinase recognition site sequences, such as, but not limited to, FLP recombinase and frt recombinase recognition site sequences, R recombinase and Rs recombinase recognition site sequences, Dre recombinase and rox recombinase recognition site sequences, and Gin recombinase and gix recombinase recognition site sequences.

### Example 11

[0299] This example illustrates compositions and reaction mixtures useful for delivering at least one effector molecule for inducing a genetic alteration in a plant cell or plant protoplast.

[0300] Sequences of plasmids for delivery of Cas9 (Csn1) endonuclease from the Streptococcus pyogenes Type II CRISPR/Cas system and for delivery of a single guide RNA (sgRNA) are provided in Tables 3 and 4. In this non-limiting example, the sgRNA targets the endogenous phytoene desaturase (PDS) in soybean. Glycine max; one of skill would understand that other sgRNA sequences for alternative target genes could be substituted in the plasmid.

TABLE 3
sgRNA vector (SEQ ID NO: 677), 3079 base pairs DNA

| Nucleotide | | |
|---|---|---|
| position in | | |
| SEQ ID NO: 677 | Description | Comment |
| 1-3079 | Intact plasmid | SEQ ID NO: 677 |
| 379-395 | M13 forward primer for sequencing | |
| 412-717 | Glycine max U6 promoter | |
| 717-736 | Glycine max phytoene desaturase targeting | SEQ ID NO: 678 |
| | sequence (gRNA) | |
| 737-812 | guide RNA scaffold sequence for S. pyogenes | SEQ ID NO: 679 |
| | CRISPR/Cas9 system | |
| 856-874 | M13 reverse primer for sequencing | complement |
| 882-898 | lac repressor encoded by lacI | |
| 906-936 | lac promoter for the E. coli lac operon | complement |
| 951-972 | E. coli catabolite activator protein (CAP) | |
| | binding site | |
| 1260-1848 | high-copy-number ColE1/pMB1/pBR322/pUC | complement |
| | origin of replication (left direction) | |
| 2019-2879 | CDS for bla, beta-lactamase, AmpR | complement; ampicillin |
| | | selection |
| 2880-2984 | bla promoter | complement |

[0301] The sgRNA vector having the sequence of SEQ ID NO:677 contains nucleotides at positions 717-812 encoding a single guide RNA having the sequence of SEQ ID NO:680 (GAAGCAAGAGACGTTCTAGGGTTTAGAGCTAGAAATAGCAAGTAAAATAAGGCTAG TCCGTTATCAACTGAAAAAGTGGCACCGAGTCGGTGC), which includes both a targeting sequence (gRNA) (GAAGCAAGAGACGTTCTAGG, SEQ ID NO:678) and a guide RNA scaffold (GTTTTAGAGCTAGAAATAGCAAGTTAAAATAAGGCTAGTCCGTTATCAACTTGAAAAA GTGGCACCGAGTCGGTGC, SEQ ID NO:679); transcription of the sgRNA is driven by a Glycine max U6 promoter at nucleotide positions 412-717. The sgRNA vector also includes lac operon and ampicillin resistance sequences for convenient selection of the plasmid in bacterial cultures.

TABLE 4
endonuclease vector (SEQ ID NO: 681), 8569 base pairs DNA

| Nucleotide | | |
|---|---|---|
| position in | | |
| SEQ ID NO: 681 | Description | Comment |
| 1-8569 | Intact plasmid | SEQ ID NO: 681 |
| 379-395 | M13 forward primer for sequencing | |
| 419-1908 | Glycine max UbiL promoter | |
| 1917-6020 | Cas9 (Csn1) endonuclease from the | SEQ ID NO: 682 (encodes |
| | Streptococcus pyogenes type II CRISPR/Cas | protein with sequence of |
| | system | SEQ ID NO: 683) |
| 6033-6053 | nuclear localization signal of SV40 large T | SEQ ID NO: 684 (encodes |
| | antigen | peptide with sequence of |
| | | SEQ ID NO: 685 |
| 6065-6317 | nopaline synthase (NOS) terminator and | |
| | poly(A) signal | |
| 6348-6364 | M13 reverse primer for sequencing | complement |
| 6372-6388 | lac repressor encoded by lacI | |
| 6396-6426 | lac promoter for the E. coli lac operon | complement |
| 6441-6462 | E. coli catabolite activator protein (CAP) | |
| | binding site | |
| 6750-7338 | high-copy-number ColE1/pMB1/pBR322/pUC | complement |
| | origin of replication (left direction) | |
| 7509-8369 | CDS for bla, beta-lactamase, AmpR | complement; ampicillin |
| | | selection |
| 8370-8474 | bla promoter | complement |

[0302] The endonuclease vector having the sequence of SEQ ID NO:681 contains nucleotides at positions 1917-6020 having the sequence of SEQ ID NO:682 and encoding the Cas9 nuclease from Streptococcus pyogenes that has the amino acid sequence of SEQ ID NO:683, and nucleotides at positions 6033-6053 having the sequence of CCTAAGAAGAAGAGGAAGGTT (SEQ ID NO:684) and encoding the nuclear localization signal (NLS) of simian virus 40 (SV40) large T antigen that has the amino acid sequence of PKKKRKV (SEQ ID NO:685). Transcription of the Cas9 nuclease and adjacent SV40 nuclear localization signal is driven by a Glycine max UbiL promoter at nucleotide positions 419-1908; the resulting transcript including nucleotides at positions 1917-6053 having the sequence of SEQ ID NO:686 encodes a fusion protein having the sequence of SEQ ID NO:687 wherein the Cas9 nuclease is linked through a 4-residue peptide linker to the SV40 nuclear localization signal. The endonuclease vector also includes lac operon and ampicillin resistance sequences for convenient selection of the plasmid in bacterial cultures.

[0303] Similar vectors for expression of nucleases and sgRNAs are also described. e. g., in Fauser et al. (2014) Plant J., 79:348-359; and described at www[dot]addgene[dot]org/crispr. It will be apparent to one skilled in the art that analogous plasmids are easily designed to encode other guide polynucleotide or nuclease sequences, optionally including different elements (e. g., different promoters, terminators, selectable or detectable markers, a cell-penetrating peptide, a nuclear localization signal, a chloroplast transit peptide, or a mitochondrial targeting peptide, etc.), and used in a similar manner. Embodiments of nuclease fusion proteins include fusions (with or without an optional peptide linking sequence) between the Cas9 nuclease from Streptococcus pyogenes that has the amino acid sequence of SEQ ID NO:683 and at least one of the following peptide sequences: (a) GRKKRRQRRRPPQ (“HIV-1 Tat (48-60)”, SEQ ID NO:688), (b) GRKKRRQRRRPQ (“TAT”, SEQ ID NO:689), (c) YGRKKRRQRRR (“TAT (47-57)”. SEQ ID NO:690), (d) KLALKLALKALKAALKLA (“MAP (KLAL)”, SEQ ID NO:691), (e) RQIRIWFQNRRMRWRR (“Penetratin-Arg”, SEQ ID NO:692), (f) CSIPPEVKFNKPFVYLI (“antitrypsin (358-374)”, SEQ ID NO:693), (g) RRRQRRKKRGGDIMGEWGNEIFGAIAGFLG (“TAT-HA2 Fusion Peptide”, SEQ ID NO:694), (h) FVQWFSKFLGRIL-NH2 (“Temporin L, amide”, SEQ ID NO:695), (i) LLIILRRRIRKQAHAHSK (“pVEC (Cadherin-5)”, SEQ ID NO:696), (j) LGTYTQDFNKFHTFPQTAIGVGAP (“Calcitonin”, SEQ ID NO:697), (k) GAAEAAARVYDLGLRRLRQRRRLRRERVRA (“Neurturin”, SEQ ID NO:698), (l) MGLGLHLLVLAAALQGAWSQPKKKRKV (“Human P1”, SEQ ID NO:699), (m) RQIKIWFQNRRMKWKKGG (“Penetratin”, SEQ ID NO:700), poly-arginine peptides including (n) RRRRRRRR (“octo-arginine”, SEQ ID NO:701) and (o) RRRRRRRRR (“nono-arginine”, SEQ ID NO:702), and (p) KKLFKKILKYLKKLFKKILKYLKKKKKKKK (“(BP100×2)-K8”, SEQ ID NO:703); these nuclease fusion proteins are specifically claimed herein, as are analogous fusion proteins including a nuclease selected from Cpf1, CasY. CasX, C2c1, or C2c3 and at least one of the peptides having a sequence selected from SEQ ID NOs:688-703. In other embodiments, such vectors are used to produce a guide RNA (such as one or more crRNAs or sgRNAs) or the nuclease protein; guide RNAs and nucleases can be combined to produce a specific ribonucleoprotein complex for delivery to the plant cell; in an example, a ribonucleoprotein including the sgRNA having the sequence of SEQ ID NO:680 and the Cas9-NLS fusion protein having the sequence of SEQ ID NO:687 is produced for delivery to the plant cell. Related aspects of the disclosure thus encompass ribonucleoprotein compositions containing the ribonucleoprotein including the sgRNA having the sequence of SEQ ID NO:680 and a Cas9 fusion protein such as the Cas9-NLS fusion protein having the sequence of SEQ ID NO:687, and polynucleotide compositions containing one or more polynucleotides including the sequences of SEQ ID NOs:680 or 686. The above sgRNA and nuclease vectors are delivered to plant cells or plant protoplasts using compositions and methods described in the specification.

[0304] A plasmid (“pCas9TPC-GmPDS”) having the nucleotide sequence of SEQ ID NO:704 was designed for simultaneous delivery of Cas9 (Csn1) endonuclease from the Streptococcus pyogenes Type II CRISPR/Cas system and a single guide RNA (sgRNA) targeting the endogenous phytoene desaturase (PDS) in soybean, Glycine max. In this non-limiting example, the sgRNA targets the endogenous phytoene desaturase (PDS) in soybean, Glycine max; one of skill would understand that other sgRNA sequences for alternative target genes could be substituted in the plasmid. The sequences of this plasmid and specific elements contained therein are described in Table 5 below.

TABLE 5
pCas9TPC-GmPDS vector (SEQ ID NO: 704), 14548 base pairs DNA

| Nucleotide | | |
|---|---|---|
| position in | | |
| SEQ ID NO: 704 | Description | Comment |
| 1-14548 | Intact plasmid | SEQ ID NO: 704 |
| 1187-1816 | pVS1 StaA | stability protein from the |
| | | Pseudomonas plasmid pVS1 |
| 2250-3317 | pVS1 RepA | replication protein from the |
| | | Pseudomonas plasmid pVS1 |
| 3383-3577 | pVS1 oriV | origin of replication for the |
| | | Pseudomonas plasmid pVS1 |
| 3921-4061 | basis of mobility region from pBR322 | |
| 4247-4835 | high-copy-number ColE1/pMB1/pBR322/pUC | complement |
| | origin of replication (left direction) | |
| 5079-5870 | aminoglycoside adenylyltransferase (aadA), | complement |
| | confers resistance to spectinomycin and | |
| | streptomycin | |
| 6398-6422 | left border repeat from nopaline C58 T-DNA | |
| 6599-6620 | E. coli catabolite activator protein (CAP) | |
| | binding site | |
| 6635-6665 | lac promoter for the E. coli lac operon | |
| 6673-6689 | lac repressor encoded by lacI | |
| 6697-6713 | M13 reverse primer for sequencing | |
| 6728-7699 | PcUbi4-2 promoter | |
| 7714-11817 | Cas9 (Csn1) endonuclease from the | SEQ ID NO: 682 (encodes |
| | Streptococcus pyogenes type II CRISPR/Cas | protein with sequence of |
| | system | SEQ ID NO: 683) |
| 11830-11850 | nuclear localization signal of SV40 large T | SEQ ID NO: 684 (encodes |
| | antigen | peptide with sequence of |
| | | SEQ ID NO: 685 |
| 11868-12336 | Pea3A terminator | |
| 12349-12736 | AtU6-26 promoter | |
| 12737-12756 | Glycine max phytoene desaturase targeting | SEQ ID NO: 678 |
| | sequence (gRNA) | |
| 12757-12832 | guide RNA scaffold sequence for S. pyogenes | SEQ ID NO: 679 |
| | CRISPR/Cas9 system | |
| 12844-12868 | attB2; recombination site for Gateway ® BP | complement |
| | reaction | |
| 13549-14100 | Streptomyces hygroscopicus bar or pat, encodes | |
| | phosphinothricin acetyltransferase, confers | |
| | resistance to bialophos or phosphinothricin | |
| 14199-14215 | M13 forward primer, for sequencing | complement |
| 14411-14435 | right border repeat from nopaline C58 T-DNA | |

[0305] The pCas9TPC-GmPDS vector having the sequence of SEQ ID NO:704 contains nucleotides at positions 12737-12832 encoding a single guide RNA having the sequence of SEQ ID NO:680, which includes both a targeting sequence (gRNA) (SEQ ID NO:678) and a guide RNA scaffold (SEQ ID NO:679); transcription of the single guide RNA is driven by a AtU6-26 promoter at nucleotide positions 12349-12736. This vector further contains nucleotides at positions 7714-11817 having the sequence of SEQ ID NO:682 and encoding the Cas9 nuclease from Streptococcus pyogenes that has the amino acid sequence of SEQ ID NO:683, and nucleotides at positions 11830-11850 having the sequence of SEQ ID NO:684 and encoding the nuclear localization signal (NLS) of simian virus 40 (SV40) large T antigen that has the amino acid sequence of SEQ ID NO:685. Transcription of the Cas9 nuclease and adjacent SV40 nuclear localization signal is driven by a PcUbi4-2 promoter at nucleotide positions 6728-7699; the resulting transcript including nucleotides at positions 7714-11850 having the sequence of SEQ ID NO:686 encodes a fusion protein having the sequence of SEQ ID NO:687 wherein the Cas9 nuclease is linked through a 4-residue peptide linker to the SV40 nuclear localization signal. The pCas9TPC-GmPDS vector also includes lac operon, aminoglycoside adenylyltransferase, and phosphinothricin acetyltransferase sequences for convenient selection of the plasmid in bacterial or plant cultures.

[0306] A plasmid (“pCas9TPC-NbPDS”) having the nucleotide sequence of SEQ ID NO:705 was designed for simultaneous delivery of Cas9 (Csn1) endonuclease from the Streptococcus pyogenes Type II CRISPR/Cas system and a single guide RNA (sgRNA) targeting the endogenous phytoene desaturase (PDS) in Nicotiana benthamiana; see Nekrasov et al. (2013) Nature Biotechnol., 31:691-693. In this non-limiting example, the sgRNA targets the endogenous phytoene desaturase (PDS) in Nicotiana benthamiana; one of skill would understand that other sgRNA sequences for alternative target genes could be substituted in the plasmid. The sequences of this plasmid and specific elements contained therein are described in Table 6 below.

TABLE 6
pCas9TPC-NbPDS vector (SEQ ID NO: 705), 14548 base pairs DNA

| Nucleotide | | |
|---|---|---|
| position in | | |
| SEQ ID NO: 705 | Description | Comment |
| 1-14548 | Intact plasmid | SEQ ID NO: 705 |
| 1187-1816 | pVS1 StaA | stability protein from the |
| | | Pseudomonas plasmid pVS1 |
| 2250-3317 | pVS1 RepA | replication protein from the |
| | | Pseudomonas plasmid pVS1 |
| 3383-3577 | pVS1 oriV | origin of replication for the |
| | | Pseudomonas plasmid pVS1 |
| 3921-4061 | basis of mobility region from pBR322 | |
| 4247-4835 | high-copy-number ColE1/pMB1/pBR322/pUC | Complement |
| | origin of replication (left direction) | |
| 5079-5870 | aminoglycoside adenylyltransferase (aadA), | Complement |
| | confers resistance to spectinomycin and | |
| | streptomycin | |
| 6398-6422 | left border repeat from nopaline C58 T-DNA | |
| 6599-6620 | E. coli catabolite activator protein (CAP) | |
| | binding site | |
| 6635-6665 | lac promoter for the E. coli lac operon | |
| 6673-6689 | lac repressor encoded by lacI | |
| 6697-6713 | M13 reverse primer for sequencing | |
| 6728-7699 | PcUbi4-2 promoter | |
| 7714-11817 | Cas9 (Csn1) endonuclease from the | SEQ ID NO: 682 (encodes |
| | Streptococcus pyogenes type II CRISPR/Cas | protein with sequence of |
| | system | SEQ ID NO: 683) |
| 11830-11850 | nuclear localization signal of SV40 large T | SEQ ID NO: 684 (encodes |
| | antigen | peptide with sequence of |
| | | SEQ ID NO: 685 |
| 11868-12336 | Pea3A terminator | |
| 12349-12736 | AtU6-26 promoter | |
| 12737-12756 | Nicotiana benthamiana phytoene desaturase | SEQ ID NO: 706 |
| | targeting sequence | |
| 12757-12832 | guide RNA scaffold sequence for S. pyogenes | SEQ ID NO: 679 |
| | CRISPR/Cas9 system | |
| 12844-12868 | attB2; recombination site for Gateway ® BP | Complement |
| | reaction | |
| 13549-14100 | Streptomyces hygroscopicus bar or pat, encodes | |
| | phosphinothricin acetyltransferase, confers | |
| | resistance to bialophos or phosphinothricin | |
| 14199-14215 | M13 forward primer, for sequencing | Complement |
| 14411-14435 | right border repeat from nopaline C58 T-DNA | |

[0307] The pCas9TPC-NbPDS vector having the sequence of SEQ ID NO:705 contains nucleotides at positions 12737-12832 encoding a single guide RNA having the sequence of SEQ ID NO:707 (GCCGTTAATTGAGAGTCCAGTTTAGAGCTAGAAATAGCAAGTTAAAATAAGGCTAG TCCGTTATCAACTGAAAAAGTGGCACCGAGTCGGTGC), which includes both a targeting sequence (gRNA) (GCCGTTAATTTTGAGAGTCCA, SEQ ID NO:706) and a guide RNA scaffold (SEQ ID NO:679); transcription of the single guide RNA is driven by a AtU6-26 promoter at nucleotide positions 12349-12736. This vector further contains nucleotides at positions 7714-11817 having the sequence of SEQ ID NO:682 and encoding the Cas9 nuclease from Streptococcus pyrogenes that has the amino acid sequence of SEQ ID NO:683, and nucleotides at positions 11830-11850 having the sequence of SEQ ID NO:684 and encoding the nuclear localization signal (NLS) of simian virus 40 (SV40) large T antigen that has the amino acid sequence of SEQ ID NO:685. Transcription of the Cas9 nuclease and adjacent SV40 nuclear localization signal is driven by a PcUbi4-2 promoter at nucleotide positions 6728-7699; the resulting transcript including nucleotides at positions 7714-11850 having the sequence of SEQ ID NO:686 encodes a fusion protein having the sequence of SEQ ID NO:687 wherein the Cas9 nuclease is linked through a 4-residue peptide linker to the SV40 nuclear localization signal. The pCas9TPC-NbPDS vector also includes lac operon, aminoglycoside adenylyltransferase, and phosphinothricin acetyltransferase sequences for convenient selection of the plasmid in bacterial or plant cultures.

### Example 12

[0308] This example describes the preparation of reagents to create novel diversity in a region of the genome where low recombination frequency has prevented plant breeders from being able to select for novel alleles.

[0309] Soybean protoplasts are prepared as described in Examples 1-5. Preparation of reagents is completed essentially as described in Examples 6-9.

[0310] The gene selected is SHAT1-5 (see www.uniprot.org/uniprot/W8E7P1), a major domestication gene in soybean responsible for the reduced pod shattering that is required for harvestability (doi:10.1038/ncomms4352). The selective sweep and apparent low rate of recombination at this locus has resulted in no detectable genetic diversity across a 116 kb region of Glycine max chromosome 16 including 5 genes. As such, breeders have not been able to select different alleles of SHAT1-5 or diverse alleles for the surrounding 5 genes. A partial genomic sequence of SHAT1-5 is provided as CACGTGGCCCCACACACATTTTTTCCCTCAACAGTTAAACTCTCTTCCTCCATCTTTCT TGGTAGGTGGCACTTCTCGGAGCATAGTAAAACTAACCCCA [symbol] TTTTTCTTTTCATTTTC ATTTTCATTATATTATAAACCTATATATATACCCAATTGGTTATTGGTGCTGGTGTCCCT TCAACCTTTAAAACAAACAAATCCattttctttttcttttttttttcattttattttttccattattttatCAACACAATTAAT TCCATG [symbol] TATCCTTTGGTCCTTTCTGTCCCACAGCACATATATATAGTCTCGCTTTACAT ACTCATTCCATGGCCAGTACACACACCACA [symbol] TCATATATCTTTTCAATTCCTATCC TCTTCCTTGTAGTGTACCCATTTTGAATGTGTtetctctctctctctctttctTTAGGTCCCTGGTGAATA TCTAGAACCACTCTCT (SEQ ID NO:708). A SHAT1-repressor nucleotide sequence encoded by a polynucleotide (such as a double-stranded DNA, a single-stranded DNA, a single-stranded DNA/RNA hybrid, or a double-stranded DNA/RNA hybrid) donor molecule having the sequence ATTAAAAAAATAAATAAGATATTATTAAAAAAATAAATAAGATATTATTAAAAAAATA AATAAGATATT ATTAAAAAAATAAATAAGATATT (SEQ ID NO:709) is designed for insertion at a double-strand break effected between nucleotides at positions 103/104, 274/275, or 359/360 of SEQ ID NO:708 (insertion is in between the underlined nucleotides) in order to reduce the expression of SHAT1-5 gene. The nucleotides targeted by each of the three different SHAT1-5 crRNAs are shown in bold italic in SEQ ID NO:708; the crRNA sequences are provided as AAAUGAAAAAGAAAAAUGUGGUUUUAGAGCUAUGCU (SEQ ID NO:710), AAAGGACCAAAGGAUACACAGUUUUAGAGCUAUGCU (SEQ ID NO:711), and AAGAAAGAUAUAAUGAGGUGGUUUUAGAGCUAUGCU (SEQ ID NO:712). All crRNA and tracrRNA are purchased from Integrated DNA Technologies, Coralville, IA. Ribonucleoprotein (RNP) complexes are prepared using gRNA (crRNA:tracrRNA) and Cas9 nuclease (Aldevron, Fargo, ND).

### Example 13

[0311] The determinate habit of soybean (Glycine max) is controlled by a recessive allele at the determinate stem (Dt1, GeneID: 100776154) locus. Dt1 encodes the GmTFL1b protein, an ortholog of Arabidopsis TERMINAL FLOWER 1 (TFL1). The TFL1 gene in Arabidopsis maintains the indeterminate growth of the SAM by inhibiting the expression of the floral meristem identity genes LFY and AP1. Down-regulation of Dt1 suppressed the indeterminate growth at shoot apical meristems in indeterminate plants (doi:10.1104/pp. 109.150607). Knockout Dt1 can convert indeterminate soybean varieties to determinate soybeans.

[0312] Dt1 gene exon 1 to exon 2 (473 bp, 83-555 bp downstream of TSS, exons are in uppercase) is:

(SEQ ID NO: 713)
ATGGCAAGAATGCCTTTAGAGCCTCTAATAGTGGGGAGAG
TCATAGGAGAAGTTCTTGATTCTTTTACCACAAGCACAAA
AATGATTGTGAGTTACAACAAGAATCAAGTCTACAATGGC
CATGAACTCTTCCCTTCCACTGTCAACACCAAGCCCAAGG
TTGAGATTGAGGGTGGTGATATGAGGTCCTTCTTTACACT
Ggtactatatatatatcttttatctcctctcttattcctt
ttctctttaaagaacaaagttttttgggaaaaaaaagaga
ggaaaaacttgagctgttgccagtgtgtatctitgitgtt
tcctgtaattcagctcacacagtaagtctcttttggagtt
ttctttaccaatactgaatcattaagctaatgtctcgctt
ttttggtgcagATCATGACTGACCCTGATGTTCCTGGCCC
TAGTGACCCTTATCTGAGAGAGCACTTGCACTG.

[0313] Two RNP with cutting sites at 225 bp and 511 bp downstream of TSS are delivered to cells together to knockout Dt1 gene. The crRNA sequences are

(SEQ ID NO: 714)
CUUGGGCUUGGUGUUGACAGGUUUUAGAGCUAUGCU
and
(SEQ ID NO: 715)
CACUAGGGCCAGGAACAUCAGUUUUAGAGCUAUGCU.

[0314] As an exemplary assay for readout, QPCR can be used to check the transcript level of Dt1 and CRISPR amplicon sequencing can be used to confirm the loss-of-function editing. Phenotypic readout of edited plants can be determined with determinate phenotype.

### Example 14

[0315] Soybean is a facultative short-day plant. Rich genetic variability in photoperiod responses enables the crop to adapt to a wide range of latitudes. Ten major genes have been identified so far to control time to flowering and maturity: E1, E2, E3, E4, E5, E6, E7, E8, E9 and J. E9 was identified through the molecular dissection of a QTL for early flowering introduced from a wild soybean accession. E9 encodes FT2a (GeneID: 100814951), an ortholog of Arabidopsis FLOWERING LOCUS T. Its recessive allele with lower transcript expression level delays flowering (doi:10.1186/s12870-016-0704-9). Overexpression of FT2a showed early flowering and increased pods per node (US20160304891 A1). Insertion of E2F binding site in FT2a promoter could increase the expression of FT2a in the meristem.

[0316] FT2a promoter (500 bp upstream of TSS) is:

(SEQ ID NO: 716)
AATTAATTGACAAAAAATGGTTTCTGTTTCATATAGAAAC
TATGTTTTTGTTGTGTAGTCATACATTACGGAATCTAGTT
TCCATTAAATAAGTAACGTGAAAAAAAATAAAAGGTGAAA
TATATATTGTTGGAAAAGAAGCTATGAGGTGCAAGAACCG
ATCACATGGAGAAGGCAATGAAAGACAAGGAGGAGCAATG
GAAGAGAGAAAATGAGAAGATGGAAGGGATGTGAAAATGT
TTGAAAAAAACGAGGTGATCAGTTTTAAAATACGAATTTA
GTATTTTCTTTTTAAGAAAATTCTTTCGGAAAGTCGTGTT
TTAAAACATGACTTTTATTTATTTGAAGTCGTGTTCTAAA
ACATGACTTTATTTCATATCCTTTAATATTTTATATCCTT
AATATTTTTAAAATTTATCCATTTGTAATATTTTTTAAAA
ATTGACCCATATATGTAAAATACCCGTCAAGATCTCTTTA
TTATTTTGAAAGCGAAAGCA.

[0317] The E2F binding site (4X) (5′/Phos/C*C*CGCCAAACCCGCCAAACCCGCCAAACCCGCCA*A*A-3′, SEQ ID NO:213) is inserted in Cas9/guide RNA cutting site, 357 bp, 251 bp, or 31 bp upstream of TSS. The crRNA sequences are UUGUUGGAAAAGAAGCUAUGGUUUUAGAGCUAUGCU (SEQ ID NO:717), GAAAAUGUUUGAAAAAAACGGUUUUAGAGCUAUGCU (SEQ ID NO:718), and AAAUAAUAAAGAGAUCUUGAGUUUUAGAGCUAUGCU (SEQ ID NO:719).

[0318] As an exemplary assay for readout, QPCR can be used to check the transcript level of FT2a when transiently expressing Arabidopsis E2F-a (doi:10.1074/jbc.M205125200) compared to the control (non-edited). Flowering and architecture phenotype are compared to the wild-type (non-edited).

### Example 15

[0319] Stay-green refers to the heritable delayed foliar senescence character in model and crop plant species. In functional stay-greens, the transition from the carbon capture period to the nitrogen mobilization (senescence) phase of canopy development is delayed. Quantitative trait loci studies show that functional stay-green is a valuable trait for improving crop stress tolerance (doi:10.1093/jxb/eru037). Virus-induced gene silencing-mediated silencing of GmNAC81 (GeneID: 732555) delayed leaf senescence and was associated with reductions in chlorophyll loss and lipid peroxidation. Insertion of a silencer to downregulate the expression of GmNAC81 could lead to functional stay-green phenotype (doi:10.1093/pcp/pcw059).

[0320] NAC81 promoter (500 bp upstream of TSS) is:

(SEQ ID NO: 720)
CGTACATTTTTTTTCTTACATGCTGAAATGGAAGAAATTA
AAGAACATAAAGTATAAAGTATGGTCATGAAAATTGTAAG
AGGAATTTCCGGGTAAAAGTCCAAAACCGAAAGAAAAAAT
AGGTCAAGCCATAACATGTATATGCTGTCCCACCACAGTT
TAGTCTCTGCAGACTTTTTGTCAAGCCGCGTGGGTCCCAC
TTCTGGCGGACCCACCACACTAATGTCGTAATAATGTGGA
GAGTCGCAATTACAAGTCCATTTTCTTTCAAGATTTCTTA
GAGACTTTTGTGCCCCCTAGGCCTCCACGACCAAGTCATA
ACCCAAACTCAAATATTTAATAAAAATAAATCCATCAATT
AGCATAGTTATGAAACCAACCATTCCTTATAAATACCCTC
ACAACACATATTCATTTTATATCAACTAACTTTGTGCTTC
CTCCGCAGAAAAATAAAAAAAGAGTAGCTAGCACTAGCTA
GCTAAACACAGTACGAGTAG.

[0321] The Silencer element (5′-/Phos/G* A* ATA TAT ATA TAT* T*C3′, SEQ ID NO:25) is inserted in Cas9/guide RNA cutting site, 342 bp, 201 bp, or 98 bp upstream of TSS to decrease the expression of NAC81. The crRNA sequences are

(SEQ ID NO: 721)
AGUCUGCAGAGACUAAACUGGUUUUAGAGCUAUGCU,
(SEQ ID NO: 722)
ACUUGGUCGUGGAGGCCUAGGUUUUAGAGCUAUGCU,
and
(SEQ ID NO: 723)
UAAAAUGAAUAUGUGUUGUGGUUUUAGAGCUAUGCU

[0322] As an exemplary assay for readout, QPCR can be used to check the transcript level of NAC81.

### Example 16

[0323] MicroRNAs (miRNAs) regulate gene expression by mediating gene silencing at transcriptional and post-transcriptional levels in higher plants. U.S. Pat. No. 9,040,774 B2 provides the methods for manipulating expression of a miRNA regulated target gene by interfering with the binding of the miRNA to its target gene. The miR172 family target mRNAs coding APETALA2-like transcription factors. Utilization of decoy or miRNA cleavage blocker of miR172 showed improved yield in multiple crops including soybean (see Table 3 in U.S. Pat. No. 9,040,774 B32). Mutation of miRNA targeting site in its target genes listed in Table 7 can lead to improved yield.

TABLE 7

| miRNA | Target Gene | Target Gene Annotation |
|---|---|---|
| gma-MIR172b-5p | Glyma01g39520 | transcription factor activity |
| | Glyma03g33470 | transcription factor activity |
| | Glyma05g09400 | protein kinase C activation |
| | Glyma11g05720 | transcription factor activity |
| | Glyma11g10790 | RNA-binding protein |
| | Glyma14g01950 | A2L zinc ribbon domain |
| | Glyma19g36200 | transcription factor activity |
| gma-MIR172c | Glyma01g39520 | AP2 domain-containing transcription factor |
| | Glyma03g33470 | AP2 domain-containing transcription factor |
| | Glyma05g18170 | AP2 domain-containing transcription factor |
| | Glyma05g31790 | GTPase Rab2, small G protein superfamily |
| | Glyma08g15040 | GTPase Rab2, small G protein superfamily |
| | Glyma11g05720 | AP2 domain-containing transcription factor |
| | Glyma11g15650 | AP2 domain-containing transcription factor |
| | Glyma12g07800 | AP2 domain-containing transcription factor |
| | Glyma13g40470 | AP2 domain-containing transcription factor |
| | Glyma15g04930 | AP2 domain-containing transcription factor |
| | Glyma17g18640 | AP2 domain-containing transcription factor |
| | Glyma19g36200 | AP2 domain-containing transcription factor |
| gma-MIR172g | Glyma06g15630 | ubiquitin-protein ligase activity |
| | Glyma10g27970 | ATP binding cassette protein |
| gma-MIR172h-3p | Glyma01g39520 | AP2 domain-containing transcription factor |
| | Glyma03g33470 | AP2 domain-containing transcription factor |
| | Glyma11g05720 | AP2 domain-containing transcription factor |
| | Glyma11g15650 | AP2 domain-containing transcription factor |
| | Glyma12g07800 | AP2 domain-containing transcription factor |
| | Glyma13g40470 | AP2 domain-containing transcription factor |
| | (GeneID: 100777102) | |
| | Glyma15g04930 | AP2 domain-containing transcription factor |
| | Glyma19g36200 | AP2 domain-containing transcription factor |
| gma-MIR172h-5p | Glyma06g13450 | putative ATP-dependent Clp-type protease |
| | Glyma10g08730 | nitrate, fromate, iron dehydrogenase |
| | Glyma10g30570 | targeting protein for Xklp2 |
| | Glyma11g05580 | GTP-binding ADP-ribosylation factor |
| | Glyma11g06830 | ubiquitin-protein ligase |
| | Glyma15g12600 | protease inhibitor |

[0324] RAP2-7-LIKE Exon 10 (miR172 targeting site is underlined) is:

(SEQ ID NO: 724)
GAAAGAGCAGAGAGAATGGGCACAGATCCTTCAAAAGGAG
TCCCAAACCCCAACTGGGCGTGGCAAACACATGGCCAGGT
TACTGACACCCCAGTACCACCGTTCTCTACTGCAGCATCA
TCAGGATTCTCAATTTCAGCCACTTTTCCATCAACTGCCA
TCTTTCCAACAAAATCCATCAACTCAGTTCCCCATAGCCT
CTGTTTCACTTCACCCAGCACACCAGGTAGCAACGCACCT
CAATTCTATAACTATTACGAGGTGAAGTCCCCGCAGCCAC
CGTCCTAG.

[0325] Cas9/guide RNA has cutting site at 3968 bp downstream of TSS. The crRNA sequence is GAUGCUGCAGUAGAGAACGGGUUUUAGAGCUAUGCU (SEQ ID NO:725).

[0326] Donor template consisting silent mutations of the miR 172 targeting site with flanking regions of I00 bp (underlined) is:

(SEQ ID NO: 726)
GAGAATGGGCACAGATCCTTCAAAAGGAGTCCCAAACCCC
AACTGGGCGTGGCAAACACATGGCCAGGTTACTGACACCC
CAGTACCACCGTTCTCTACTGCTGCCTCTTCCGGTTTTTC
CATTTCAGCCACTTTTCCATCAACTGCCATCTTTCCAACA
AAATCCATCAACTCAGTTCCCCATAGCCTCTGTTTCACTT
CACCCAGCACACCAGGTAGCA.

[0327] As an exemplary assay for readout. QPCR can be used to check the transcript level of RAP2-7-like.

### Example 17

[0328] Photoperiod responsiveness is a key factor in latitudinal adaption of soybean. Introduction of the long-juvenile trait extends the vegetative phase and improves yield under short-day conditions, thereby enabling expansion of cultivation in tropical regions. J (GeneID: 100793561), the major classical locus conferring the trait, is the ortholog of Arabidopsis thaliana EARLY FLOWERING 3 (ELF3). J protein downregulate E1 transcription, relieving repression of two important FLOWERING LOCUS T (FT) genes and promoting flowering under short days (doi:10.1038/ng.3819). Reduction of the J transcript level can release E1 from repression and E1 then repress FT2a and FT5a, resulting in improving adaptation of varieties from temperate regions to the tropics and enhancing the yield.

[0329] J 3′-UTR region (344 bp) is:

(SEQ ID NO: 727)
TGATGGTTCAAGTAGTTTGTCTAGTTCCTGTACTTTCTTG
GAGTATGTCATGTAACGAGCTGTTGTATTTATAATTTTTG
TTTTGGTTTTTGACCTTGTTACATACAGCACATTGGTATG
TAGATATATCTGGCATATCAAAACTGGTCAAAATGTAACA
TTATTTTATGGTATCATGTTGTTTCCATACATAAGTGTTC
GTTTTACACAGTAGTAATTGCTTTACCCGAAAGAGTAGGT
GCTCTGCTTCCTCTGTGCATGGGAGGAGGTTTTATATTGC
TTGCCTAGAAGACTAGTGATTGTCATACACATTAGCTGTT
ATTCTAATTGATTGTTTCATGTCA.

[0330] The mRNA destabilizing element (doi:10.1105/tpc.107.055046) (5′/Phos/A* A*TTTTAATTTAATTTTAATTTTAATTTTAATT*T*T-3′, SEQ ID NO:214) is inserted in Cas9/guide RNA cutting site, 5032 bp, 5110 bp, or 5255 bp downstream of TSS. The crRNA sequences are GACAUACUCCAAGAAAGUACGUUUUAGAGCUAUGCU (SEQ ID NO:728). CCUUGUUACAUACAGCACAUGUUUUAGAGCUAUGCU (SEQ ID NO:729), and AAACCUCCUCCCAUGCACAGGUUUUAGAGCUAUGCU (SEQ ID NO:730).

[0331] As an exemplary assay for readout, QPCR can be used to check the transcript level of J. Phenotypic readout of edited plants can be determined with late flowering.

### Example 18

[0332] Abscisic acid (ABA) plays a crucial role in the plant response to both biotic and abiotic stresses. Mutations in PYR/PYL receptor proteins have been identified that result in hypersensitivity to ABA to enhance plant drought resistance (U.S. Patent Application Publication 2016/0194653). Mutation on GmPYL9 (GeneID: 100810273) E137 corresponding to the amino acid E141 in Arabidopsis thaliana PYR1 can enhance the sensitivity to ABA.

[0333] GmPYL9 exon 3 (216 bp, 2827-3042 bp downstream of TSS, the nucleotides encoding E137 are underlined) is:

(SEQ ID NO: 731)
AACTATTCTTCCATAATCACCGTCCATCCAGAGGTCATCG
ATGGGAGACCCGGTACAATGGTGATCGAATCATTTGTGGT
GGATGTGCCTGATGGGAACACCAGGGATGAAACTTGTTAC
TTTGTGGAGGCTTTGATCAGGTGTAACCTAAGCTCTTTAG
CTGATGTCTCAGAGAGGATGGCCGTGCAAGGTCGAACCAA
TCCTATCAACCATTAA.

[0334] Amino acid sequence encoded by this region with E137 underlined which is mutated to L to increase GmPYL9 sensitivity to ABA is NYSSIITVHPEVIDGRPGTMVIESFVVDVPDGNTRDETCYFVEALIRCNLSSLADVSERMAVQ GRTNPINH* (SEQ ID NO:732).

[0335] Cas9/guide RNA with cutting site at 2902 bp downstream of TSS is

(SEQ ID NO: 733)
GGUGAUCGAAUCAUUUGUGGGUUUUAGAGCUAUGCU.

[0336] Donor template consisting E137 mutated to L with flanking regions of 100 bp (underlined) is

(SEQ ID NO: 734)
GGTTTAATACTCAATCATGTTGTGGAATTTGCAGAACTAT
TCTTCCATAATCACCGTCCATCCAGAGGTCATCGATGGGA
GACCCGGTACAATGGTGATCCTATCATTTGTGGTGGATGT
GCCTGATGGGAACACCAGGGATGAAACTTGTTACTTTGTG
GAGGCTTTGATCAGGTGTAACCTAAGCTCTTTAGCTGATG
TC

[0337] As an exemplary assay for readout, CRISPR amplicon sequencing can be used to confirm the GA to CT mutation. Seedlings of edited plants can be treated with 10 uM ABA for 1 hour and then the expression level of ABA inducible genes can be measured (higher in edited seedlings compared to the wild-type control).

### Example 19

[0338] Soybean is a short-day crop with high protein and oil contents. Many cultivars have been bred with different maturity to adapt to various environments. Flowering and maturity are highly controlled by major genes in soybean. Up to now, nine maturity loci have been identified as E1-E8 and J. E2 (GeneID: 100800578) is an orthologue of Arabidopsis flowering gene GIGANTEA. E2 delays flowering and maturity under long day length condition through downregulating GmFT2a and GmFT5a. Recessive e2 promote flowering and maturity (doi:10.1534/genetics.110.125062). Higher methylation at the promoter of E2 gene can reduce its expression and generate a weaker epiallele for early flowering and maturity.

[0339] Constructs for dCas9-SunTag and anti-GCN4 scFv fused to proteins involved in RNA-directed DNA methylation, for example, DEFECTIVE IN MERISTEM SILENCING3 (DMS3), the de novo DNA methyltransferase DOMAINS REARRANGED METHYLTRASFERASE2 (DRM2) or tobacco DRM catalytic domain (doi:10.1016/j.cell.2014.03.056) are used to target E2 gene promoter for increasing methylation.

[0340] E2 gene promoter (539 bp, including 300 bp upstream of TSS and 5′-UTR in uppercase) is:

(SEQ ID NO: 735)
aaattctaaaaaaaaaaaaataatttataaggataaaaaa
attaaatcataaaaatcaaaaagatatttcaaccttaacg
ttaaatacatatgtaataatacagttagaattacaaataa
ggtgactgcagtagaatatatgtgtaatgacgatggatgg
gcatccatgtccatgataaagatggatggacatgaacata
catacatatgtgtaagagtagcatgacgtgacacggggta
ggactcaggaggtgagaggaaaatatcattgccacgtatt
caatcaatctaggcttctcAGAGCTGCTAAAGATCTTCTC
TTTCTTTCTCTCTCCCAGTTGTGTTCTCTTCTCTAGTTTG
TTTCTGCAGTTTTGCCTCTCTCTCTCTCTCTCTCACTATC
TATCTATCCCACCATAACCATTAACCACCACCTCTTAAAT
ATTTTTCCACAAATCACCAAAATTTOCCATTTTTTTCACC
CTCTGAATCACAATTTTTTTCTTTCTAACTAAAATCGCCT
CTACACACAAGGATTCAG.

[0341] Three guide RNAs targeting region in the promoter and 5′-UTR regions of E2 gene are designed to bring DNA methyltransferase or DMS3 to increase promoter methylation level. The crRNA sequences are GAGUAGCAUGACGUGACACGGUUUUAGAGCUAUGCU (SEQ ID NO:736), GCCUAGAUUGAUUGAAUACGGUUUUAGAGCUAUGCU (SEQ ID NO:737), and CUAGAGAAGAGAACACAACUGUUUUAGAGCUAUGCU (SEQ ID NO:738).

[0342] As an exemplary assay for readout, QPCR can be used to check the transcript level of E2 gene and bisulfite sequencing can be used to determine the targeted methylation region in the promoter and 5′-UTR.

### Example 20

[0343] This example describes the preparation of reagents for the modification of three genes in a soybean plant cell to provide increased nitrogen use efficiency.

[0344] Soybean protoplasts are prepared as described in Examples 1-5. Preparation of reagents for gene editing is carried out using procedures similar to those described in Examples 6-9.

[0345] An increase in expression of NRT (GLYMA_12G078900) is predicted to increase nitrogen use efficiency (NUE). The sequence of NRT is shown as AATTTAATCTAATGGTAGATAATGTGTTCAAAGGAACGCTTGATAACATTTCTCGTGATA AATACGTATTTTATGAGACTATTTAGTTATGATCATCCATGTCAATGTCAATTCCAACCCAA AGTAATGATCATGTGCCAAGTTGCCACCCATAATTTATCTCAAAATTAATGAAACCCAA ATAAAGGCGTTGAATAATACCACCATACAAAAGTGTGTTATTTAGCAGCATATGTAACT AGGCATATATCTATCTGTATATATGAGAGTTGATTATGTGTCACATATGAACCTTTGAGA CATACCATGGGTTCTTTTGGCATACGCGGCGAAATGGATTACGTCAAATACAGCTTTTG TTTAATGCTTAAAGCTTTGGCAGCCGATGGAAATTTCATTGGCATTGTCAACGCCTTCCC CTACTATAAGTACAATCACACTCCTTGTCTCCCTCACAACACTAGGCCTTCAATTTGGT TTTGTTTCATCAGTTTTCCAGATACAGCACATTGATTGTTAAGGCGAAATGGCTGATATT GAGGGTT (SEQ ID NO:739). Similar to the previous examples, a nitrogen-responsive element (NRE) sequence having the sequence of AGAAACAACTTGACCCTTTACATTGCTCAAGAGCTCATCTCTT (SEQ ID NO:740) and encoded by a polynucleotide (such as a double-stranded DNA, a single-stranded DNA, a single-stranded DNA/RNA hybrid, or a double-stranded DNA/RNA hybrid) donor molecule is designed for insertion at a double-strand break effected between nucleotides at positions 101/102, 303/304, and 446/447 of SEQ ID NO:739 in order to enhance the expression of NRT. Three NRT crRNAs are designed to target the nucleotides shown in bold italic in SEQ ID NO:739 and have the sequences of AGUGUUGUGAGGGAGAGACAGUUUUAGAGCUAUGCU (SEQ ID NO:741), GAACCUUUGAGACAUACCAUGUUUUAGAGCUAUGCU (SEQ ID NO:742), and GGGUUGGAAAUUAAUUGACAGUUUUAGAGCUAUGCU (SEQ ID NO:743). All crRNAs and tracrRNA are purchased from Integrated DNA Technologies, Coralville. IA. Ribonucleoprotein (RNP) complexes are prepared using gRNA (crRNA:tracrRNA) and Cas9 nuclease (Aldevron, Fargo, ND).

[0346] An increase in expression of NRT and NRT2 (Glyma13g39850.1) simultaneously is predicted to further increase nitrogen use efficiency (NUE). A partial genomic sequence of NRT2 is provided as TTGTACTCCTAGTTATTATCTTAAAAAAATTGAATCATATAATTATATATTAAGTTTTG AATATGTGTTTCCATCTTATAGTTTATGAGATTACCATG [symbol] TTTAACAGATTGGGATCTAC AAACTTTAAAAGTAAGCAGTAGATACATAATAGTTTTATAGGCCTGGTGGTTAGCTGA AATTTACAGCTAAC [symbol] CGCGGATAATGAACCCCAATGATGAAAACATGCAGACGCATGTT GCAGCATGGAAGTATTTTATTTAATAAGAATAATAATAAGGTAAGTGGTAGTAATTAAA TTCCATATTCAGTATCATGGGAAATGAGATTCTTTGCCTTTGGGATACACCATTAGGCTT TTAGCCGTCCACT [symbol] GTATATGCGGCGAAATGCATTACTCCATGGCCCTTGGGAATCCA CTTGCCTCCTATCAGACTCTTACGTAGTCAACGCCTTCGCCTACTATAAAAACAC (SEQ ID NO:744), a nitrogen-responsive element (NRE) sequence having the sequence of SEQ ID NO:740 and encoded by a polynucleotide (such as a double-stranded DNA, a single-stranded DNA, a single-stranded DNA/RNA hybrid, or a double-stranded DNA/RNA hybrid) donor molecule is designed for insertion at a double-strand break effected between nucleotides at positions 101/102, 195/196, and 374/375 of SEQ ID NO:744 in order to enhance the expression of NRT2. Three NRT2 crRNAs are designed to target the nucleotides shown in bold italic in SEQ ID NO:744 and have the sequences of AUUUCGCCGCAUAUACACAGGUUUUAGAGCUAUGCU (SEQ ID NO:745), UGAAAUUUACAGCUACUACGGUUUUAGAGCUAUGCU (SEQ ID NO:746), and AUCCCAAUCUGUUAAACACAGUUUUAGAGCUAUGCU (SEQ ID NO:747). All crRNAs and tracrRNA are purchased from Integrated DNA Technologies, Coralville, IA. Ribonucleoprotein (RNP) complexes are prepared using gRNA (crRNA:tracrRNA) and Cas9 nuclease (Aldevron, Fargo, ND).

[0347] An increase in expression of NRT, NRT2 and glutamine synthase (GS, Glyma.07G104500) simultaneously can even further increase nitrogen use efficiency (NUE). Constitutive overexpression of GS has been shown to result in increased photosynthesis under low nitrate conditions (see, e. g., doi:10.1104/pp. 020013). In this example, the expression of GS is constitutively increased by inserting a constitutive enhancer sequence. A partial genomic sequence of GS is provided as CAAAAATTAATTCITTAGTAATGATAGAATCTAATATCTTAATTCAATGATTAATTATA ACTTAAGTCTTCCTTTAAAATAAATCTCATCTCATCTCCTTC [symbol] CCTTTTTTGAGAGAGAA TCTCATCTCATTCTTCGGTGATCAAATCTAGTGCCAGTACCGTACTTGGTACGCTACCTT CACTTGCCTAT [symbol] GCTTATCAGCTATCACCTACCTTTCATAATTAATATAAAAAATAAAT AAACAATGTCGCTGCAAAGCATGTTCATGTTCATTAATTCATTTTTATTATTAAAAAAAA AACACCCCTTTATTTAGGCGGCGGAAAAA [symbol] CACGGTATCCACCACTTTCTTTATCTT TAGAGATCTTCTTTATATATATATATATATATAGATAGATAGATAGATAGATACAGAG ATGAAAAATACT (SEQ ID NO:748). A maize OCS homologue encoded by a chemically modified single-stranded DNA with the sequence of GTAAGCGCTTAC (SEQ ID NO:749, Integrated DNA Technologies, Coralville, IA), phosphorylated on the 5′ end and containing two phosphorothioate linkages at each terminus (i.e., the two linkages between the most distal three bases on either end of the strand) is designed for insertion at a double-strand break effected between nucleotides at positions 103/104, 193/194, and 331/332 of SEQ ID NO: 748 in order to provide constitutively increased expression of GS. A GS crRNA is designed to target the nucleotides shown in bold italic in SEQ ID NO:748 and has the sequences of GUGAUAGCUGAUAAGCACAUGUUUUAGAGCUAUGCU (SEQ ID NO:750), UUAGGCGGCGGAAAAACUCAGUUUUAGAGCUAUGCU (SEQ ID NO:751), and UCUCUCUCAAAAAAGGAAGAGUUUUAGAGCUAUGCU (SEQ ID NO:752). The crRNA and tracrRNA are purchased from Integrated DNA Technologies, Coralville, IA. Ribonucleoprotein (RNP) complexes are prepared using gRNA (crRNA:tracrRNA) and Cas9 nuclease (Aldevron, Fargo, ND).

### Example 21

[0348] This example describes the modification of two soybean genes to make early flowering soybeans.

[0349] FT2a and E2 regulate flowering time in soybean. The gene modification for increasing the expression of FT2a is described in Example 14. The gene modification for making the epigenetic change of E2 is described in Example 19.

[0350] As an exemplary assay for readout, QPCR can be used to check the transcript level of FT2a and E2. The edited plants are measured for flowering time.

### Example 22

[0351] It is predicted that modification of NRT, NRT2, and GS in soybean will result in soybean cells with increased nitrogen use efficiency (NUE), and, further that the additional modification of FT2a will result in early flowering, higher yielding soybean plants (see. e. g., U.S. Patent Application Publication 20160304891 A1, incorporated herein by reference).

[0352] Soybean protoplasts are prepared as described in Examples 1-5. Preparation of reagents is completed essentially as described in Examples 6-10.

[0353] An increase in expression of NRT (GLYMA_12G078900) is predicted to increase nitrogen use efficiency (NUE). The sequence of NRT is shown as SEQ ID NO:739. Similar to the previous examples, a nitrogen-responsive element (NRE) sequence having the sequence of SEQ ID NO:740 and encoded by a polynucleotide (such as a double-stranded DNA, a single-stranded DNA, a single-stranded DNA/RNA hybrid, or a double-stranded DNA/RNA hybrid) donor molecule is designed for insertion at a double-strand break effected between nucleotides at positions 101/102, 303/304, and 446/447 of SEQ ID NO:739 in order to enhance the expression of NRT. Three NRT crRNAs are designed to target the nucleotides shown in bold italic in SEQ ID NO:739 and have the sequences of SEQ ID NOs:741, 742, and 743. All crRNAs and tracrRNA are purchased from Integrated DNA Technologies, Coralville, IA. Ribonucleoprotein (RNP) complexes are prepared using gRNA (crRNA:tracrRNA) and Cas9 nuclease (Aldevron, Fargo, ND).

[0354] An increase in expression of NRT and NRT2 (Glyma13g39850.1) simultaneously is predicted to further increase nitrogen use efficiency (NUE). A partial genomic sequence of NRT2 is provided as SEQ ID NO:744, a nitrogen-responsive element (NRE) sequence having the sequence of SEQ ID NO:740 and encoded by a polynucleotide (such as a double-stranded DNA, a single-stranded DNA, a single-stranded DNA/RNA hybrid, or a double-stranded DNA/RNA hybrid) donor molecule is designed for insertion at a double-strand break effected between nucleotides at positions 101/102, 195/196, and 374/375 of SEQ ID NO:744 in order to enhance the expression of NRT2. Three NRT2 crRNAs are designed to target the nucleotides shown in bold italic in SEQ ID NO:744 and have the sequences of SEQ ID NOs: 745, 746, and 747. All crRNAs and tracrRNA are purchased from Integrated DNA Technologies, Coralville, IA. Ribonucleoprotein (RNP) complexes are prepared using gRNA (crRNA:tracrRNA) and Cas9 nuclease (Aldevron, Fargo, ND).

[0355] An increase in expression of NRT, NRT2 and glutamine synthase (GS, Glyma.07G104500) simultaneously can even further increase nitrogen use efficiency (NUE). Constitutive overexpression of GS has been shown to result in increased photosynthesis under low nitrate conditions (see, e. g., doi:10.1104/pp. 020013). In this example, the expression of GS is constitutively increased by inserting a constitutive enhancer sequence. A partial genomic sequence of GS is provided as SEQ ID NO:748. A maize OCS homologue encoded by a chemically modified single-stranded DNA with the sequence of SEQ ID NO:749 (Integrated DNA Technologies, Coralville, IA), phosphorylated on the 5′ end and containing two phosphorothioate linkages at each terminus (i. e., the two linkages between the most distal three bases on either end of the strand) is designed for insertion at a double-strand break effected between nucleotides at positions 103/104, 193/194, and 331/332 of SEQ ID NO: 748 in order to provide constitutively increased expression of GS. A GS crRNA is designed to target the nucleotides shown in bold italic in SEQ ID NO:748 and has the sequences of SEQ ID NO: ID NO:750, 751, and 752. The crRNA and tracrRNA are purchased from Integrated DNA Technologies, Coralville, IA. Ribonucleoprotein (RNP) complexes are prepared using gRNA (crRNA:tracrRNA) and Cas9 nuclease (Aldevron, Fargo, ND).

[0356] FT2a (Glyma.16G150700) is the mobile flowering trigger in soybean and an increase in expression of FT2a is anticipated to trigger flowering. Early flowering is not normally a desirable phenotype as early-flowering plants do not maintain high vegetative growth rates, resulting in overall lower yields. It is predicted that a short burst of FT2a expression will be sufficient to trigger flowering while allowing the plants to maintain vegetative growth, resulting in an everbearing and high-yielding phenotype. Thus, in addition to the increased nitrogen utilization efficiency achieved by modification of NRT, NTR2, and GS, an auxin-inducible element is integrated in the promoter of the FT2a gene. A partial genomic sequence of FT2a is provided as AAAGAAGCTATGAGGTGCAAGAACCGATCACATGGAGAAGGCAATGAAAGACAAGGA GGAGCAATGGAAGAGAGAAAATGAGAAGATGGAAGGGATGTGAAAATGTTTGAAAAAA ACGAGGTGATCAGTTTTAAAATACGAATTTAGTATTTTCTTTTTAAGAAAATTCTTTCGG AAAGTCGTGTTTTAAAACATGACTTTTATTTATTTGAAGTCGTGTTCTAAAACATGACTT TATTTCATATCCTTTAATATTTTATATCCTTAATATTTTAAAATTTATCCATTTGTAATAT TTTITAAAAATTGACCCATATATGTAAAATACCCGTCAAGATTCTTTATTATGAAAG CGAAAGCATATCACTTCAAACACAATGGAATCGAGGCTATTGACTAAGTATAAATAGAG AAGACTTCATATCGGGGTTCATAATTCATAACAAAGCAAACGAGTATATAAGAAAGCAT AAGCCAAATTTGAGTAAACTAGTGTGCACACTATCCC (SEQ ID NO:753). The auxin-responsive element 3×DR5 with the sequence of GCUCCUCACUAGCUACCAAGGUUUUAGAGCUAUGCU (SEQ ID NO:754) is provided as a polynucleotide (e. g., as a double-stranded DNA, a single-stranded DNA, a single-stranded DNA/RNA hybrid, or a double-stranded DNA/RNA hybrid) donor molecule for insertion at a double-strand break effected between nucleotides at positions 115/116, 334/335, and 428/429 of SEQ ID NO:753. A FT2a crRNA is designed to target the nucleotides shown in bold italic in SEQ ID NO: 753 and has the sequences of GAAAAUGUUUGAAAAAAACGGUUUUAGAGCUAUGCU (SEQ ID NO:755), AUAGAGAAGACUUCAUAUCGGUUUUAGAGCUAUGCU (SEQ ID NO:756) and AAUAAUAAAGAGAUCUUGACGUUUUAGAGCUAUGCU (SEQ ID NO:757). The crRNA and tracrRNA are purchased from Integrated DNA Technologies, Coralville, IA. Ribonucleoprotein (RNP) complexes are prepared using gRNA (crRNA:tracrRNA) and Cas9 nuclease (Aldevron, Fargo, ND).

### Example 23

[0357] This example describes additional genomic modifications that further enhance the effects of the modifications of soybean genes described in Example 22. E1 (Glyma.06G207800.1) is a large effect flowering time gene in soybean and has been reported to be a repressor of two genes involved in the induction of flowering, FT2a and FT5a (see, e. g., DOI:10.1104/pp. 15.00763). It is predicted that by stacking the inducible increased expression of FT2a described in Example 22 with a modest decrease in expression of E1 will result in early flowering with increased yield outcomes. In this example, a SAUR mRNA destabilizing sequence is integrated in the 3′ untranslated region (3′ UTR) of the E1 gene. SAUR destabilizing sequences result in reduced expression due to increased mRNA degradation (see, e. g., doi:10.1105/tpc.5.6.701, and U. S. Patent Application Publication 2007/0011761, incorporated herein by reference). A partial genomic sequence of E1 is provided as ATCGGATTCATTGGGATCCATATAATTGCGTTTTCAATTCTGTGTCCTTAAACAAGCT ATGCCAGAGAATTAATTAATTTTAAGTGTTAGCTTATTATTTTACTTTCAAATCATTGA GGAAAACAATGGCCTATATATTATTCCTATATGTAACATACAATAATGTTATTGCAATAG CGTGTACTTCAACCTAATTATTTAATACCAAGTTTCTATATTAATGTTGTATCTTATGAA ATCCTTCTATTTTCCATTCTATAAATTA (SEQ ID NO:758). A SAUR mRNA destabilizing element with the sequence of AGATCTAGGAGACTGACATAGATTGGAGGAGACATTTTGTATAATAAGATCTAGGAGAC TGACATAGATTGGAGGAGACATTTGTATAATA (SEQ ID NO:759) is designed for insertion at a double-strand break effected between nucleotides at positions 117/118 or 152/153 of SEQ ID NO:758. The SAUR destabilizing element in the form of a single-stranded DNA molecule, phosphorylated on the 5′ end and containing two phosphorothioate linkages at each terminus (i. e., the two linkages between the most distal three bases on either end of the strand) is purchased from Integrated DNA Technologies, Coralville, IA. A E1 crRNA is designed to target the nucleotides shown in bold italic in SEQ ID NO:758 and has the sequences of AUUUUACUUUCAAAUCAUUGGUUUUAGAGCUAUGCU (SEQ ID NO:760) and CAUUAUUGUAUGUUACAUAUGUUUUAGAGCUAUGCU (SEQ ID NO:761). The E1 crRNA and tracrRNA are purchased from Integrated DNA Technologies, Coralville. IA. Ribonucleoprotein (RNP) complexes are prepared using gRNA (crRNA:tracrRNA) and Cas9 nuclease (Aldevron, Fargo, ND).

### Example 24

[0358] This example describes the modification of two soybean genes to increase drought resistance and to enhance determinant growth.

[0359] Modification of GmPYL9 gene and dt1 gene together can increase drought resistance and enhance determinant growth. The modification of GmPYL9 gene is described in Example 18. The modification of dt1 gene is described in Example 13.

[0360] As an exemplary assay for readout, QPCR can be used to check the transcript level of GmPYL9 and dt1. The edited plants can be tested for drought resistance and determinant growth.

### Example 25

[0361] Soy productivity can be improved by targeting processes associated with non-photochemical quenching (NPQ). This is a strategy to increase photosynthetic efficiency. Orthologous genes to those targeted in Kromdjik et al. (2016, Science, 354 (6314): 857-61) can be up-regulated by inserting an enhancer element in the promoter proximal region of the soybean orthologous genes for the chloroplastic photosystem II 22 kDa protein (PsbS), violaxanthin de-epoxidase (VDE) and zeoxanthin epoxidase (ZEP). Upregulation of each individual gene in model plants has a low to marginal effect on photosynthetic efficiency (Hubbart et al., 2012, The Plant Journal: For Cell and Molecular Biology, 71 (3): 402-12; Leonelli et al., 2016, The Plant Journal: For Cell and Molecular Biology, 88 (3): 375-86). The combined effect of up-regulating all three genes produces a much larger effect. Kromdjik et al. (2016) demonstrated this in tobacco by inserting transgenes driven by highly active green tissue-preferred promoters. Here we demonstrate how this can be done using gene editing technology.

[0362] There is scattered evidence for ‘enhancer’ elements that function in plants, and may be applicable here (Marand et al., 2017, Plant Gene Regulatory Mechanisms and Networks, 1860 (1): 131-39). Most of the heavily used cis-enhancer elements come from plant pathogens. For example, there are well characterized virus-derived enhancer elements that work well in crops like maize (Davies et al., 2014, BMC Plant Biology, 14 (December): 359) but these are less desirable due to their length (generally 1-200 bp). Technology to scan genomes for putative regulatory elements that are ˜20 bp in length is available. Most of the work has been done in Arabidopsis (Burgess et al., 2015, Current Opinion in Plant Biology, 27 (October): 141-47) and this remains a largely theoretical area. Here we use the nopaline synthase OCS element (5′-ACGTAAGCGCTTACGT-3, SEQ ID NO:210), Ellis et al., 1987, The EMBO Journal, 6 (11): 3203-8) to upregulate the three soybean NPQ genes. G-box (5′-/Phos/G*C* CAC GTG CCG CCA CGT GCC GCC ACG TGC CGC CAC GTG* C*C-3′, SEQ ID NO:211) and green tissue-specific promoter (GSP, 5′-/Phos/A*A*AATATTTATAAAATATTTATAAAATATTTATAAAATATTT*A*T-3′, SEQ ID NO:212) can also be used to upregulate the NPQ genes.

[0363] Gene editing strategies for increasing these genes expression by insertion of enhancer element in the promoter of the member of each family are listed in the Table 8 below.

TABLE 8

| Gene family | Member | Gene ID | Change in gene activity | Element inserted |
|---|---|---|---|---|
| PSBS | Glyma.06G113200 | 100779417 | Increase expression | OCS, G-box, or GSP |
| | Glyma.04G249700 | 100807355 | Increase expression | OCS, G-box, or GSP |
| ZEP | Glyma.11g055700 | 100820171 | Increase expression | OCS, G-box, or GSP |
| | Glyma.17G174500 | 100800186 | Increase expression | OCS, G-box, or GSP |
| VDE | Glyma.03G253500 | 100816085 | Increase expression | OCS, G-box, or GSP |
| | Glyma.19G251000 | 100778118 | Increase expression | OCS, G-box, or GSP |

[0364] An appropriate guide RNA is designed to target Cas9 or its equivalent to one or more sites within 500 bp of each gene's transcription start site. The site-directed endonuclease can be delivered as a ribonucleoprotein (RNP) complex or encoded on plasmid DNA. Synthetic oligonucleotides representing 1-5 copies of the OCS element (Ellis et al. 1987) are co-delivered with the site-specific endonuclease. The design of each guide RNA can be developed and optimized in a soybean protoplast system, using qRT-PCR of mRNA from each target gene to report successful upregulation. Alternatively, a synthetic promoter for each target gene, linked to a suitable reporter gene like eGFP, can be co-transfected with the site-specific RNPs and enhancer oligonucleotide into protoplasts to evaluate the efficacy of all possible guide RNAs to identify the most effective candidates for delivery to whole plant tissues. The most effective RNPs are used to insert the NPQ technology in soybean.

[0365] One of many published methods for introducing the OCS enhancer element into the predetermined target sites of the soybean NPQ genes can used to generate lines with enhanced photosynthetic activity. These include Agrobacterium, viral or biolistic-mediated approaches (Senapati, 2016 (doi:10.9734/ARRB/2016/22300)). The RNPs and OCS element can also be introduced by microinjection.

[0366] Soybean tissues that are appropriate for genome editing manipulation include embryogenic callus, exposed shoot apical meristems and 1 DAP embryos. There are many approaches to producing embryogenic callus (Lee et al., 2013 (doi:10.5772/51076), Homrich et al., 2012 (doi:10.1590/S1415-47572012000600015), Maheshwari and Kovalchuk, 2016 (doi:10.1016/B978-1-893997-98-1.00014-2), Finer, 2016 (doi:10.1002/cppb.20039)). Shoot apical meristem explants can be prepared using a variety of methods in the art (Sticklen and Oraby, 2005 (doi:10.1079/IVP2004616), Baskaran and Dasgupta, 2012 (doi:10.1007/s13562-011-0078-x), Senapati, 2016 (doi:10.9734/ARRB/2016/22300)). This work describes how to prepare and nurture material that is adequate for microinjection.

[0367] To prepare soy explants for microinjection, soy seed sterilized, imbibed and dissected as described in Yang et al., 2016 (doi:10.1007/s11738-016-2081-2) or Luth et al 2015 (doi:10.1007/978-1-4939-1695-5_22). The cotyledon sections can be cultivated with or without the cytokinin, 6-benzylaminopurine (BAP) which produces de novo vegetative buds (Buising 1992 (lib.dr.iastate.edu/rtd/9821). The 2-3 mm embryonic axes are placed on the appropriate solid support medium and oriented for easy access using a microinjection needle.

[0368] Microinjection is used to target specific cells in the shoot apical meristem. For example, an injector attached to a Narashige manipulator on a dissecting microscope is adequate for injecting relatively large cells (e.g., the egg/synergids/zygote and the central cell). For smaller cells, such as those of the embryo or shoot apical meristem, a compound, inverted microscope with an attached Narashige manipulator can be used. Injection pipette diameter and bevel are also important. Use a high-quality pipette puller and beveler to prepare needles with adequate strength, flexibility and pore diameter. These will vary depending on the cargo being delivered to cells. The volume of fluid to be microinjected must be exceedingly small and must be carefully controlled. An Eppendorf Transjector yields consistent results (Laurie et al., 1999).

[0369] The genetic cargo can be RNA, DNA, protein or a combination thereof. For example to introduce the NPQ trait the cargo consists of the RNPs targeting the promoter proximal region of the soybean PsBS. VDE and ZEP genes, and the OCS enhancer element. The concentration of each cargo component will vary depending on the nature of the manipulation. Typical cargo volumes can vary from 2-20 nanoliters. After microinjection, treated plant parts are maintained on an appropriate media alone or supplemented with a feeder culture. Plantlets are transferred to fresh media every two weeks and to larger containers as they grow. Plantlets with a well-developed root system are transferred to soil and maintained in high-humidity for 5 days to acclimate. Plants are gradually exposed to the air and cultivated to reproductive maturity.

[0370] Several molecular techniques can be used to confirm that the intended edits are present in the treated plants. These include sequence analysis of each target site and qRT-PCR of each target gene. The NPQ trait is confirmed using photosynthesis instrument such as a Ciras 3 or Licor 6400, to compare modified plants to unmodified or wildtype plants. The NPQ trait is expected to increase biomass accumulation relative to wildtype plants.

### Example 26

[0371] To obtain modified soybean plants with improved pest and/or pathogen resistance, the endogenous soybean GmDR1 gene (SEQ ID NO: 762) is subjected to targeted modifications that result in increased expression of the GmDR1 protein (SEQ ID NO: 763). Such modified soybean plants will exhibit improved resistance to soybean pests including spider mites, soybean aphids, and soybean cyst nematode as well as soybean pathogens including Fusarium virguliforme.

Endogenous soybean GmDRI gene (Glyma 10g09480;
SEQ ID NO: 762) with promoter
region in lowercase.
(SEQ ID NO: 762)
tattcaaaccatagactagtottttcttaaacatatcata
gccgttgctatgtcaagggtgcttcggctggtttgaaaca
gagttgccaccaattgcaatgaattgagaaaagatagcct
gcctagtaatccctttcacattccattttactcttttttt
tcottccaagtaaccaacaacacaaaactgttctatgaat
ccaaacgtgccagttatccaagccatgtgggaaactctaa
gtgtagggtgtatcataagtggtagttgccttattgttcc
tacatagctgtgatgtaagagtctctttgaggatgctatg
ccacccttccccaactagctttgattggtcttgtggggtc
ttcaaaagccttaaccaaaaagggatagtaacattcaaaa
tggttaatgtttaatgcaccattttaccaacttaaaaatc
gtgaccatattatgatgtaacaagtttaattttcctaagt
cctatataagttcaacccttggctcaatctttcaacAATT
CAGTTGCTTACTAATACTAATCTCTTAATTCTCTTTGGCC
ATTTCTTTAGTAACATTAAGATAATGTATTCTGTGGAAAT
GGCACCTTATGGTAGATTCATTGCTAACATTTTGATAGCT
GTGATGTTTGTTTGCTTGTTTTTTGTGACCAACATTGTGG
CACAGGATTCAGAGATTGCTCCTACAGGTCAATTGGAGGC
TGGAACTGGGTTTGATTTGCCTGTTTCTAAGGTGATGATG
TGTTCTTCAGTGTTGGCATCTCTTTTGGCATTCATGTTGC
AGTGAATTGGAAGACAGTGGGTTTCAAATTTGAACTTGTT
GGGGATAATCTTACTTTGTATGTGGGTTAAAATTCATATG
TTTATATATATACTATATACTATATGTTTGGTTGTTGAAA
ATGGTACTGTATTTTTGGGCATTITGTAAGATTAGCTTTA
TGAGGAGCTACAGTTACAAGTATGTAATTTCTACTCAGCT
ATTATTGGTGTGAGCTGATATATTAATATAATTGTTAAGT
TCCTT
GmDR1 protein (SEQ ID NO: 763)
(SEQ ID NO: 763)
MYSVEMAPYGRFIANILIAVMFVCLFFVTNIVAQDSEIAP
TGQLEAGTGFDLPVSKVMMCSSVLASLLAFMLQ

[0372] Targeted modifications in the GmDR1 include insertions of one or more regulatory sequences in the promoter and/or 5′UTR of the GmDR1 gene set forth in SEQ ID NO: 764 or in the 3′UTR of the GmDR1 gene set forth in SEQ ID NO:766. A particular subset of the targeted modifications that result in increased expression of GmDR1 include both insertions of whole enhancer elements as well as mutations (e.g., one or more nucleotide substitutions, insertions, and or deletions) in the GmDR1 promoter and/or 5′UTR of SEQ ID NO: 764. Without seeking to be limited by theory, it is believed that such mutations in the GmDR1 promoter and/or 5′UTR will be less disruptive of endogenous transcription-related elements in the GmDR1 gene and facilitate increased expression of GmDR1.

Promoter and/or 5′UTR of the GmDR1
(SEQ ID NO: 764) with 5′UTR in uppercase.
(SEQ ID NO: 764)
tattcaaaccatagactagtcttttcttaaacatatcata
gccgttgctatgtcaagggtgcttcggctggtttgaaaca
gagttgccaccaattgcaatgaattgagaaaagatagcct
gcctagtaatccctttcacattccattttactcttttttt
tccttccaagtaaccaacaacacaaaactgttctatgaat
ccaaacgtgccagttatccaagccatgtgggaaactctaa
gtgtagggtgtatcataagtggtagttgccttattgttcc
tacatagctgtgatgtaagagtctctttgaggatgctatg
ccacccttccccaactagctttgattggtcttgtggggtc
ttcaaaagccttaaccaaaaagggatagtaacattcaaaa
tggttaatgtttaatgcaccattttaccaacttaaaaatc
gtgaccatattatgatgtaacaagtttaattttcctaagt
cctatataagttcaacccttggctcaatctttcaacAATT
CAGTTGCTTACTAATACTAATCTCTTAATTCTCTTTGGCC
ATTTCTTTAGTAACATTAAGATA
Protein coding region of the GmDR1 gene
(SEQ ID NO: 765)
(SEQ ID NO: 765)
ATGTATTCTGTGGAAATGGCACCTTATGGTAGATTCATTG
CTAACATTTTGATAGCTGTGATGTTTGTTTGCTTGTTTTT
TGTGACCAACATIGTGGCACAGGATTCAGAGATTGCTCCT
ACAGGTCAATTGGAGGCTGGAACTGGGTTTGATTTGCCTG
TTTCTAAGGTGATGATGTGTTCTTCAGTGTTGGCATCTCT
TTTGGCATTCATGTTGCAGTGA
3′ UTR cf thc GmDR1 (SEQ ID NO: 766)
(SEQ ID NO: 766)
ATTGGAAGACAGTGGGTTTCAAATTTGAACTTGTTGGGGA
TAATCTTACTTTGTATGTGGGTTAAAATTCATATGTTTAT
ATATATACTATATACTATATGTTTGGTTGTTGAAAATGGT
ACTGTATTTTTGGGCATTTTGTAAGATTAGCTTTATGAGG
AGCTACAGTTACAAGTATGTAATTTCTACTCAGCTATTAT
TGGTGTGAGCTGATATATTAATATAATTGTTAAGTTCCTT

[0373] A particular subset of mutations in the endogenous soybean GmDR1 promoter and/or 5′UTR of SEQ ID NO: 764 include mutations that introduce at least one, two, or three enhancer elements with the sequence GTAAGCGCTTAC (SEQ ID NO: 184) into the promoter and/or 5′UTR. The SEQ ID NO:184 enhancers can be introduced as monomers, dimers, or trimers at one or more locations in the GmDR1 promoter and/or 5′UTR. Examples of suitable locations for introduction of SEQ ID NO: 184 monomers, dimers, or trimers in the GmDR1 promoter of SEQ ID NO: 764 include residues 130 to 157 and/or 300 to 306 of SEQ ID NO: 764. Examples of suitable locations for introduction of SEQ ID NO: 184 monomers, dimers, or trimers in the GmDR1 5′ UTR of SEQ ID NO: 764 include residues 520 to 525 of SEQ ID NO: 764. Particular residues in the endogenous soybean GmDR1 promoter and/or 5′UTR of SEQ ID NO: 764 targeted for introduction of at least one SEQ ID NO:184 enhancer are depicted in the SEQ ID NO:764 sequence depicted below, where the targeted regions are bracketed (i.e., placed between a { and a} bracket), residues that are not mutated are underlined, and residues which are mutagenized to introduce the corresponding residues of SEQ ID NO: 184 are shown in bold.

| (SEQ ID NO: 764) | |
|---|---|
| tattcaaacc atagactagt cttttcttaa acatatcata gccgttgcta tgtcaagggt | 60 |
| gcttcggctg gtttgaaaca gagttgccac caattgcaat gaattgagaa aagatagcct | 120 |
| gcctagtaa{t ccctttcaca ttccatt}tta ctcttttttt tccttccaag taaccaacaa | 180 |
| cacaaaactg ttctatgaat ccaaacgtgc cagttatcca agccatgtgg gaaactctaa | 240 |
| gtgtagggtg tatcataagt ggtagttgcc ttattgttcc tacatagcty tgatgtaag{a | 300 |
| gtctct}ttga ggatgctatg ccacccttcc ccaactagct ttgattggtc ttgtggggtc | 360 |
| ttcaaaagcc ttaaccaaaa agggatagta acattcaaaa tggttaatgt ttaatgcacc | 420 |
| attttaccaa cttaaaaatc gtgaccatat tatgatgtaa caagtttaat tttcctaagt | 480 |
| cctatataag ttcaaccctt ggctcaatct ttcaacAAT{T CAGTT}GCTTA CTAATACTAA | 540 |
| TCTCTTAATT CTCTTTGGCC ATTTCTTTAG TAACATTAAG ATA | |

[0374] A resultant modified soybean GmDR1 promoter and 5′UTR containing all of the introduced SEQ ID NO:184 enhancer elements is depicted below, where the enhancer sequences are in bold and underlined. In certain cases, the modified soybean GmDR1 promoter can contain only a subset of the modifications introduced at residues 130 to 157, 300 to 306, and/or 520 to 525.

(SEQ ID NO: 767)
tattcaaacc atagactagt cttttcttaa acatatcata
gccgttgcta tgtcaagggt gcttcggctg gtttgaaaca
gagttgccac caattgcaat gaattgagaa aagatagcct
gcctagtaag cgcttacgta agcgcttac tcttttttt
tccttccaag taaccaacaa cacaaaactg ttctatgaat
ccaaacgtgc cagttatcca agccatgtgg gaaactctaa
gtgtagggtg tatcataagt ggtagttgcc ttattgttcc
tacatagctg tgatgtaagc gcttacttga ggatgctatg
ccacccttcc ccaactagct ttgattggtc ttgtggggtc
ttcaaaagcc ttaaccaaaa agggatagta acattcaaaa
tggttaatgt ttaatgcacc attttaccaa cttaaaaatc
gtgaccatat tatgatgtaa caagtttaat tttcctaagt
cctatataag ttcaaccctt ggctcaatct ttcaacAATG
TAAGCGCTTA CTAATACTAA TCTCTTAATT CTCTTTGGCC
ATTTCTTTAG TAACATTAAG ATA

[0375] Another resultant modified soybean GmDR1 promoter and 5′UTR containing all of the introduced SEQ ID NO:184 enhancer elements is depicted below, where the introduced enhancer sequences are in bold and underlined. In certain cases, the modified soybean GmDR1 promoter can contain only a subset of the modifications introduced at residues 130 to 157, 300 to 306, and/or 520 to 525.

(SEQ ID NO: 768)
tattcaaacc atagactagt cttttcttaa acatatcata
gccgttgcta tgtcaagggt gcttcggctg gtttgaaaca
gagttgccac caattgcaat gaattgagaa aagatagcct
gcctagtaagcgcttac gtaagcgcttacg taagcgcttac
tcttttttt tccttccaag taaccaacaa cacaaaactg
ttctatgaat ccaaacgtgc cagttatcca agccatgtgg
gaaactctaa gtgtagggtg tatcataagt ggtagttgcc
ttattgttcc tacatagctg tgatgtaagc gcttacttga
ggatgctatg ccacccttcc ccaactagct ttgattggtc
ttgtggggtc ttcaaaagcc ttaaccaaaa agggatagta
acattcaaaa tggttaatgt ttaatgcacc attttaccaa
cttaaaaatc gtgaccatat tatgatgtaa caagtttaat
tttcctaagt cctatataag ttcaaccctt ggctcaatct
ttcaacAATG TAAGCGCTTA CTAATACTAA TCTCTTAATT
CTCTTTGGCC ATTTCTTTAG TAACATTAAG ATA

[0376] Soybean plants comprising the modifications in the GmDR1 promoter and/or 5′UTR are obtained by introducing one or more double-stranded breaks in the indicated regions and inserting a suitable polynucleotide donor molecule comprising the desired replacement sequences and suitable homology arms to effect replacement of the endogenous soybean genomic sequences by homology-directed repair. Modified soybean plants comprising the enhancer substitutions in the GmDR1 promoter and/or 5′UTR are screened for increased expression of the GmDR1 protein and/or mRNA transcripts encoding the same and/or are screened for one or more of improved resistance to a pest (e.g., soybean aphid, a spider mite, or a soybean cyst nematode) and/or pathogen (e.g., Fusarium virguliforme, Pseudomonas syringae, Pseudomonas sojae, or soybean mosaic virus) relative to a reference (i.e., control) soybean plant lacking the modification in the GmDR1 promoter and/or 5′UTR. Modified soybean plants comprising the modifications in the GmDR1 promoter and/or 5′UTR and exhibiting improved resistance to the pest and/or pathogen are selected.

### Example 27

[0377] Table 10 provides a list of genes in soybean associated with various traits including abiotic stress resistance, plant architecture, biotic stress resistance, photosynthesis, and resource partitioning. Within each trait, various non-limiting (and often overlapping) sub-categories of traits may be identified, as presented in the Table. For example, “abiotic stress resistance” may be related to or associated with changes in abscisic acid (ABA) signaling, biomass, cold tolerance, drought tolerance, tolerance to high temperatures, tolerance to low temperatures, and/or salt tolerance; the trait “plant architecture” may be related to or may include traits such as biomass, fertilization, flowering time and/or flower architecture, inflorescence architecture, lodging resistance, root architecture, shoot architecture, leaf architecture, and yield; the trait “biotic stress” may include disease resistance, insect resistance, population density stress and/or shading stress; the trait “photosynthesis” can include photosynthesis and respiration traits; the trait “resource partitioning” can include or be related to biomass, seed weight, drydown rate, grain size, nitrogen utilization, oil production and metabolism, protein production and metabolism, provitamin A production and metabolism, seed composition, seed filling (including sugar and nitrogen transport), and starch production and metabolism. By modifying one or more of the associated genes in Table 10, each of these traits may be manipulated singly or in combination to improve the yield, productivity or other desired aspects of a soybean plant comprising the modification(s).

[0378] Each of the genes listed in Table 10 may be modified using any of the gene modification methods described herein. In particular, each of the genes may be modified using the targeted modification methods described herein which introduce desired genomic changes at specific locations in the absence of off-target effects. Even more specifically, each of the genes in Table 10 may be modified using the CRISPR targeting methods described herein, either singly or in multiplexed fashion. For example, a single gene in Table 10 could be modified by the introduction of a single mutation (change in residue, insertion of residue(s), or deletion of residue(s)) or by multiple mutations. Another possibility is that a single gene in Table 10 could be modified by the introduction of two or more mutations, including two or more targeted mutations. In addition, or alternatively, two or more genes in Table 10 could b^{e} modified (e.g., using the targeted modification techniques described herein) such that the two or more genes each contains one or more modifications.

[0379] The various types of modifications that can be introduced into the genes of Table 10 have been described herein. The modifications include both modifications to regulatory regions that affect the expression of the gene product (i.e., the amount of proteins or RNA encoded by the gene) and modifications that affect the sequence or activity of the encoded protein or RNA (in some cases the same modification may affect both the expression level and the activity of the encoded protein or RNA). Modifying genes encoding proteins with the amino acid sequences listed in Table 10 (e.g., SEQ ID Nos: 456-495, 497-530, 535-646, 648-65 and 656), or sequences with at least 95%, 96%, 97%, 98%, or 99% identity to the protein sequences listed in Table 10, may result in proteins with improved or diminished activity. Methods of alignment of sequences for comparison are well known in the art. Two examples of algorithms that are suitable for determining percent sequence identity and sequence similarity are the BLAST and BLAST 2.0 algorithms, which are described in Altschul et al., (1977) Nuc. Acids Res. 25:3389-3402; and Altschul et al., (1990) J. Mol. Biol. 215:403-410, respectively. Software for performing BLAST analyses is publicly available through the National Center for Biotechnology Information. Optimal alignment of sequences for comparison can also be conducted, e.g., by the local homology algorithm of Smith and Waterman, (1970) Adv. Appl. Math. 2:482c, by the homology alignment algorithm of Needleman and Wunsch, (1970) J. Mol. Biol. 48:443, by the search for similarity method of Pearson and Lipman, (1988) Proc. Nat'l. Acad. Sci. USA 85:2444, by computerized implementations of these algorithms (GAP, BESTFIT, FASTA, and TFASTA in the Wisconsin Genetics Software Package, Genetics Computer Group, 575 Science Dr., Madison, WI), or by manual alignment and visual inspection (see, e.g., Brent et al., (2003) Current Protocols in Molecular Biology).

[0380] In some cases, targeted modifications may result in proteins with no activity (e.g., the introduction of a stop codon may result in a functionless protein) or a protein with a new activity or feature. Similarly, the sequences of the miRNAs listed in Table 10 may also be modified to increase, decrease or reduce their activity.

[0381] In addition to modifications to the encoded proteins or miRNAs, each of the gene sequences listed in Table 10 (e.g., the gene sequences of SEQ IDs 235-396 and 398-435) may also be modified, individually or in combination with one or more other modifications, to alter the expression of the encoded protein or RNA, or to alter the stability of the RNA encoding the corresponding protein sequence. For example, regulatory sequences affecting transcription of any of the genes listed in Table 10, including primer sequences and transcription factor binding sequences, can be modified, or introduced into, any of the gene sequences listed in Table 10 using the methods described herein. The modifications can effect increases in transcription levels, decreases in transcription levels, and/or changes in the timing of transcription of the genes under control of the modified regulatory regions. Targeted epigenetic modifications affecting gene expression may also be introduced.

[0382] Regulatory regions (e.g., regulatory regions in the gene sequences provided in Table 10) can be identified using techniques described in the literature, e.g., Bartlett A. et al, “Mapping genome-wide transcription-factor binding sites using DAP-seq.”, Nat Protoc. (2017) August; 12(8):1659-1672; O'Malley R. C. et al, “Cistrome and Epicistrome Features Shape the Regulatory DNA Landscape”, Cell (2016) September 8; 166(6):1598; He Y et al, “Improved regulatory element prediction based on tissue-specific local epigenomic signatures”, Proc Natl Acad Sci USA, (2017) February 28; 114(9):E1633-E1640; Zefu Lu et al, “Combining ATAC-seq with nuclei sorting for discovery of cis-regulatory regions in plant genomes”, Nucleic Acids Research, (2017) V45(6); Rurika Oka et al, “Genome-wide mapping of transcriptional enhancer candidates using DNA and chromatin features in maize”, Genome Biology (2017) 18:137. In addition, Table 9, provided herein, lists sequences which may be inserted into or otherwise created in the genomic sequences of Table 10 for the purpose of regulating gene expression and/or transcript stability.

[0383] The stability of transcribed RNA encoded by the genes in Table 10 including the GmDR1 gene (in addition to other genes), can be increased or decreased by the targeted insertion or creation of the transcript stabilizing or destabilizing sequences provided in Table 9 (e.g., SEQ ID Nos. 198-200, 202 and 214). In addition, Table 10 includes miRNAs whose expression can be used to regulate the stability of transcripts comprising the corresponding recognition sites. Additional miRNAs, miRNA precursors and miRNA recognition site sequences that can be used to regulate transcript stability and gene expression in the context of the methods described herein may be found in, e.g., U.S. Pat. No. 9,192,112 (e.g., Table 2), U.S. Pat. Nos. 8,946,511 and 9,040,774, the disclosures of each of which are incorporated by reference herein.

[0384] Any of the above regulatory modifications may be combined to regulate a single gene, or multiple genes, or they may be combined with the non-regulatory modifications discussed above to regulate the activity of a single modified gene, or multiple modified genes. The genetic modifications or gene regulatory changes discussed above may affect distinct traits in the soybean cell or plant, or they make affect the same trait. The resulting effects of the described modifications on a traitor trait may be additive or synergistic. Modifications to the soybean genes listed in Table 10 may be combined with modifications to other sequences in the soybean genome for the purpose of improving one or more soybean traits. The soybean sequences of Table 10 may also be modified for the purpose of tracking the expression or localizing the expression or activity of the listed genes and gene products.

### Example 28

[0385] To determine whether GmDR1 increased expression can lead to enhanced plant immunity, the expression levels of marker genes which are responsive to PAMP (Pathogen Associated Molecular Pattern: molecules originating from plant pathogens and elicit plant defense/immune responses) are tested. Chitin will be used as PAMP.

[0386] Immune responses to chitin are tested in a soybean transient transgenic hairy root system. The soybean transient transgenic hairy root system is essentially as described in the literature (Tóth et al., Curr Protoc Plant Biol 2016 May; 1(1):1-13. Doi: 10.1002/cppb.20017; Song et al., Curr Protoc 2021 July; 1(7):e195. doi: 10.1002/cpzl.195).

[0387] The constructs comprising the following sequences are introduced into soybean transgenic roots:
[0388] (a) pGmDR1: GmDR1 (native GmDR1 promoter and gene; SEQ ID NO: 769).
[0389] (b) pGmDR1 (3×OCS): GmDR1 (a modified GmDR1 promoter comprising the SEQ ID NO:184 zmOCS enhancer element inserted as a trimer and operably linked to the GmDR1 gene; SEQ ID NO: 770);
[0390] (c) pProm3 (Glyma.20g220800): GmDR1 (positive control); and
[0391] (d) Empty vector (negative control).

[0392] Transgenic roots are separated from nontransgenic roots about 2 weeks post-induction under stereomicroscope (as visualized by mScarlet marker carried by the T-DNA). The transgenic mScarlet positive roots are treated mock (H₂O) or chitin treated for at least 30 min (and/or 1 h). Expression levels of GmPR1-1/2 (marker genes for SA (salicylic acid)-regulated defense pathway; GmEDS1 a/b (positive basal resistance regulator; Glyma04g34800 and Glyma.06g19920); GmNPR1-1/2 and GmNAC6 (stressed-induced TF, SA pathway; Glyma.12G022700) are tested by qRT-PCR. RNA is extracted from the roots and used as a template for cDNA synthesis. Gene expression is analyzed by qRT-PCR by using 2 housekeeping/reference genes for normalization (e.g., one or more of Cons6 and/or Cons4 from Libault et al., The Plant Genome 2008; https://doi.org/10.3835/plantgenome2008.02.0091; Ngaki et al., Plant Biotechnol J 2021 March; 19(3):502-516. doi: 10.1111/pbi.13479).

### Example 29

[0393] To increase expression of the endogenous GmDR1 gene (SEQ ID NO: 762) or an allelic variant thereof, the following guide RNAs are used with a Cas nuclease to introduce a double-stranded break (DSB) into a GmDR1 promoter or 5′ untranslated region (5′ UTR) set forth in SEQ ID NO: 764. A zmOCS enhancer element comprising SEQ ID NO:184 or a trimer thereof is provided on a DNA donor template for insertion at the site of the double-stranded break using either non-homologous end joining (NHEJ) or homology dependent repair (HDR). In certain instances where HDR and a donor template containing the zmOCS enhancer element comprising SEQ ID NO:184 or a trimer thereof are used, plant expression cassettes for expressing a Bacteriophage lambda exonuclease, a bacteriophage lambda beta SSAP protein, and an E. coli SSB are constructed and used essentially as set forth in US Patent Application Publication 20200407754, which is incorporated herein by reference in its entirety. A DNA sequence encoding a tobacco c2 nuclear localization signal (NLS) is fused in-frame to the DNA sequences encoding the exonuclease, the bacteriophage lambda beta SSAP protein, and the E. coli SSB to provide a DNA sequence encoding the c2 NLS-Exo, c2 NLS lambda beta SSAP, and c2 NLS-SSB fusion proteins that are set forth in SEQ ID NO: 135, SEQ ID NO: 134, and SEQ ID NO: 133 of US Patent Application Publication 20200407754, respectively, and incorporated herein by reference in its entirety.

TABLE 11
introduction of a zmOCS trimer
element in a GmDR1 promoter

| guide_ | Distance | gRNA Target | PAM |
|---|---|---|---|
| id | to TATA | Sequence | type |
| T1 | 12 | TTTCCTAAGTCCTATATAAGTTCAACC | TTTN |
| | | (SEQ ID NO: 771) | |
| T20 | −36 | TTTACCAACTTAAAAATCGTGACCATA | TTTN |
| | | (SEQ ID NO: 772) | |
| T16 | −119 | TTTGAAGACCCCACAAGACCAATCAAA | TTTN |
| | | (SEQ ID NO: 773) | |
| T33 | −153 | TTTGAGGATGCTATGCCACCCTTCCCC | TTTN |
| | | (SEQ ID NO: 774) | |
| T27 | −251 | TTTCCCACATGGCTTGGATAACTGGCA | TTTN |
| | | (SEQ ID NO: 775) | |
| T8 | −299 | TTTGTGTTGTTGGTTACTTGGAAGGAA | TTTN |
| | | (SEQ ID NO: 776) | |
| T6 | −300 | TTTCCTTCCAAGTAACCAACAACACAA | TTTN |
| | | (SEQ ID NO: 777) | |
| T4 | −374 | TTTCTCAATTCATTGCAATTGGTGGCA | TTTN |
| | | (SEQ ID NO: 778) | |
| T7 | −387 | TTTGAAACAGAGTTGCCACCAATTGCA | TTTN |
| | | (SEQ ID NO: 779) | |
| T31 | −407 | TTTCAAACCAGCCGAAGCACCCTTGAC | TTTN |
| | | (SEQ ID NO: 780) | |
| T13 | −436 | TTTCTTAAACATATCATAGCCGTTGCT | TTTN |
| | | (SEQ ID NO: 781) | |

[0394] An example of a modified GmDR1 gene containing an insertion of the zmOCS trimer element at a double stranded break that can be introduced by the T20 gRNA directed to the SEQ ID NO: 772 target site and a Cas nuclease is set forth in SEQ ID NO: 770. The modified GmDR1 gene having the sequence of SEQ ID NO: 770 is shown below, where the promoter is in upper case, the zmOCS trimer element is in bold, the TATA-box is underlined, and the 5′ UTR, coding sequence, and 3′ UTR are in lower case.

(SEQ ID NO: 770)
CAAAATGGTCCAAATTAAATATTGTCATTCTTATATTTCT
TGTTACATCTCTAAAGAGCTAAGCTACATTTATAACTCAC
AATCAACGAAATAAATAATTAAAAAAATGACTTAAGTATG
TTTGTAGTCCTTAAAGTTTTGGACCGGGAGTAAATCTATT
TTGGATTCTTAAATTGAAAAAATAAAAAATATTTTAATCC
TCAAATTTCAAAAAATATGTTTTTAGTCGTTGGATGCCAA
CAACCTCGACAAAAGTGATCCATTTTCAAATACCAAAGTC
ATCACTTCCGTTAACACAGTCTAGCTCCATGGATTAAAAT
TGTACTTTTAAAATGAGACTGAAATGATTTTATTTTATTT
TCTAAATTTGGAGAGCCAAAAACGAATCCATCCCAAATTC
TCAGGAACTTTAAAAACATAATTAAGAAAAAAATCCTATT
ATTCGTTTTTTTTTTCTCAATTGCCAAATGAAATTGAAGT
TCTAGATTTATCTCTCTAGAAAGCAAAAGGGATATCTATA
TTCAAACCATAGACTAGTCTTTTCTTAAACATATCATAGC
CGTTGCTATGTCAAGGGTGCTTCGGCTGGTTTGAAACAGA
GTTGCCACCAATTGCAATGAATTGAGAAAAGATAGCCTGC
CTAGTAATCCCTTTCACATTCCATTTTACTCTTTTTTTTC
CTTCCAAGTAACCAACAACACAAAACTGTTCTATGAATCC
AAACGTGCCAGTTATCCAAGCCATGTGGGAAACTCTAAGT
GTAGGGTGTATCATAAGTGGTAGTTGCCTTATTGTTCCTA
CATAGCTGTGATGTAAGAGTCTCTTTGAGGATGCTATGCC
ACCCTTCCCCAACTAGCTTTGATTGGTCTTGTGGGGTCTT
CAAAAGCCTTAACCAAAAAGGGATAGTAACATTCAAAATG
GTTAATGTTTAATGCACCATTTTACCAACTTAAAAATCGT
GACGTAAGCGCTTACGTAAGCGCTTACGTAAGCGCTTAC
CATATTATGATGTAACAAGTTTAATTTTCCTAAGTCCTAT
ATAAGTTCAACCCTTGGCTCAATCTTTCAACaattcagtt
gottactaatactaatctcttaattctctttggccattte
tttagtaacattaagataatgtattctgtggaaatggcac
cttatggtagattcattgctaacattttgatagctgtgat
gtttgtttgcttgttttttgtgaccaacattgtggcacag
gattcagagattgctcctacaggtcaattggaggctggaa
ctgggtttgatttgcctgtttctaaggtgatgatgtgttc
ttcagtgttggcatctcttttggcattcatgttgcagtga
attggaagacagtgggtttcaaatttgaacttgttgggga
taatcttactttgtatgtgggttaaaattcatatgtttat
atatatactatatactatatgtttggttgttgaaaatggt
actgtatttttgggcattttgtaagattagctttatgagg
agctacagttacaagtatgtaatttctactcagctattat
tggtgtgagctgatatattaatataattgttaagttcctt
G

TABLE 9

| Type of | | | |
|---|---|---|---|
| regulation | Name of element | Sequence | SEQ ID |
| regulatory control | ABFs binding site | CACGTGGC | SEQ ID NO: 19 |
| by TF | motif | | |
| regulatory control | ABRE binding site | (C/T)ACGTGGC | SEQ ID NO: 20 |
| by TF | motif | | |
| regulatory control | ABRE-like binding | (C/G/T)ACGTG(G/T)(A/C) | SEQ ID NO: 21 |
| by TF | site motif | | |
| regulatory control | ACE promoter motif | GACACGTAGA | SEQ ID NO: 22 |
| by TF | | | |
| regulatory control | AG binding site | TT(A/G/T)CC(A/T)(A/T)(A/T)(A/T)(A/T)(A/T)GG(A/C/T) | SEQ ID NO: 23 |
| by TF | motif | | |
| regulatory control | AG binding site in | CCATTTTTAGT | SEQ ID NO: 24 |
| by TF | AP3 | | |
| regulatory control | AG binding site in | CCATTTTTGG | SEQ ID NO: 25 |
| by TF | SUP | | |
| regulatory control | AGL1 binding site | NTT(A/G/T)CC(A/T)(A/T)(A/T)(A/T)NNGG(A/T)AAN | SEQ ID NO: 26 |
| by TF | motif | | |
| regulatory control | AGL2 binding site | NN(A/T)NCCA(A/T)(A/T)(A/T)(A/T)T(A/G)G(A/T)(A/T)AN | SEQ ID NO: 27 |
| by TF | motif | | |
| regulatory control | AGL3 binding site | TT(A/T)C(C/T)A(A/T)(A/T)(A/T)(A/T)T(A/G)G(A/T)AA | SEQ ID NO: 28 |
| by TF | motif | | |
| regulatory control | AP1 binding site in | CCATTTTTAG | SEQ ID NO: 29 |
| bv TF | AP3 | | |
| regulatory control | AP1 binding site in | CCATTTTTGG | SEQ ID NO: 30 |
| by TF | SUP | | |
| regulatory control | ARF binding site | TGTCTC | SEQ ID NO: 31 |
| by TF | motif | | |
| regulatory control | ARFI binding site | TGTCTC | SEQ ID NO: 32 |
| by TF | motif | | |
| regulatory control | ATHB1 binding site | CAAT(A/T)ATTG | SEQ ID NO: 33 |
| by TF | motif | | |
| regulatory control | ATHB2 binding site | CAAT(C/G)ATTG | SEQ ID NO: 34 |
| by TF | motif | | |
| regulatory control | ATHB5 binding site | CAATNATTG | SEQ ID NO: 35 |
| by TF | motif | | |
| regulatory control | ATHB6 binding site | CAATTATTA | SEQ ID NO: 36 |
| by TF | motif | | |
| regulatory control | AtMYB2 binding | CTAACCA | SEQ ID NO: 37 |
| bv TF | site in RD22 | | |
| regulatory control | AtMYC2 binding | CACATG | SEQ ID NO: 38 |
| by TF | site in RD22 | | |
| regulatory control | Box II promoter | GGTTAA | SEQ ID NO: 39 |
| by TF | motif | | |
| regulatory control | CArG promoter | CC(A/T)(A/T)(A/T)(A/T)(A/T)(A/T)GG | SEQ ID NO: 40 |
| by TF | motif | | |
| regulatory control | CArG1 motif in AP3 | GTTTACATAAATGGAAAA | SEQ ID NO: 41 |
| by TF | | | |
| regulatory control | CArG2 motif in AP3 | CTTACCTTTCATGGATTA | SEQ ID NO: 42 |
| bv TF | | | |
| regulatory control | CArG3 motif in AP3 | CTTTCCATTTTTAGTAAC | SEQ ID NO: 43 |
| by TF | | | |
| regulatory control | CBF1 binding site in | TGGCCGAC | SEQ ID NO: 44 |
| by TF | cor15a | | |
| regulatory control | CBF2 binding site | CCACGTGG | SEQ ID NO: 45 |
| by TF | motif | | |
| regulatory control | CCA1 binding site | AA(A/C)AATCT | SEQ ID NO: 46 |
| by TF | motif | | |
| regulatory control | CCA1 motif1 | AAACAATCTA | SEQ ID NO: 47 |
| by TF | binding site in CABI | | |
| regulatory control | CCA1 motif2 | AAAAAAAATCTATGA | SEQ ID NO: 48 |
| by TF | binding site in CABI | | |
| regulatory control | DPBF1&2 binding | ACACNNG | SEQ ID NO: 49 |
| by TF | site motif | | |
| regulatory control | DRE promoter motif | TACCGACAT | SEQ ID NO: 50 |
| by TF | | | |
| regulatory control | DREB1&2 binding | TACCGACAT | SEQ ID NO: 51 |
| by TF | site in rd29a | | |
| regulatory control | DRE-like promoter | (A/G/T)(A/G)CCGACN(A/T) | SEQ ID NO: 52 |
| by TF | motif | | |
| regulatory control | E2F binding site | TTTCCCGC | SEQ ID NO: 53 |
| by TF | motif | | |
| regulatory control | E2F/DP binding site | TTTCCCGC | SEQ ID NO: 54 |
| by TF | in AtCDC6 | | |
| regulatory control | E2F-varient binding | TCTCCCGCC | SEQ ID NO: 55 |
| by TF | site motif | | |
| regulatory control | EIL1 binding site in | TTCAAGGGGGCATGTATCTTGAA | SEQ ID NO: 56 |
| by TF | ERF1 | | |
| regulatory control | EIL2 binding site in | TTCAAGGGGGCATGTATCTTGAA | SEQ ID NO: 57 |
| by TF | ERF1 | | |
| regulatory control | EIL3 binding site in | TTCAAGGGGGCATGTATCTTGAA | SEQ ID NO: 58 |
| by TF | ERF1 | | |
| regulatory control | EIN3 binding site in | GGATTCAAGGGGGCATGTATCTTGAATCC | SEQ ID NO: 59 |
| bv TF | ERF1 | | |
| regulatory control | ERE promoter motif | TAAGAGCCGCC | SEQ ID NO: 60 |
| by TF | | | |
| regulatory control | ERFI binding site in | GCCGCC | SEQ ID NO: 61 |
| by TF | AtCHI-B | | |
| regulatory control | EveningElement | AAAATATCT | SEQ ID NO: 62 |
| by TF | promoter motif | | |
| regulatory control | GATA promoter | (A/T)GATA(G/A) | SEQ ID NO: 63 |
| bv TF | motif | | |
| regulatory control | GBF1/2/3 binding | CCACGTGG | SEQ ID NO: 64 |
| by TF | site in ADH1 | | |
| regulatory control | G-box promoter | CACGTG | SEQ ID NO: 65 |
| by TF | motif | | |
| regulatory control | GCC-box promoter | GCCGCC | SEQ ID NO: 66 |
| by TF | motif | | |
| regulatory control | GT promoter motif | TGTGTGGTTAATATG | SEQ ID NO: 67 |
| by TF | | | |
| regulatory control | Hexamer promoter | CCGTCG | SEQ ID NO: 68 |
| by TF | motif | | |
| regulatory control | HSEs binding site | AGAANNTTCT | SEQ ID NO: 69 |
| by TF | motif | | |
| regulatory control | Ibox promoter motif | GATAAG | SEQ ID NO: 70 |
| by TF | | | |
| regulatory control | JASE1 motif in | CGTCAATGAA | SEQ ID NO: 71 |
| by TF | OPR1 | | |
| regulatory control | JASE2 motif in | CATACGTCGTCAA | SEQ ID NO: 72 |
| by TF | OPR2 | | |
| regulatory control | LI-box promoter | TAAATG(C/T)A | SEQ ID NO: 73 |
| by TF | motif | | |
| regulatory control | LS5 promoter motif | ACGTCATAGA | SEQ ID NO: 74 |
| by TF | | | |
| regulatory control | LS7 promoter motif | TCTACGTCAC | SEQ ID NO: 75 |
| by TF | | | |
| regulatory control | LTRE promoter | ACCGACA | SEQ ID NO: 76 |
| by TF | motif | | |
| regulatory control | MRE motif in CHS | TCTAACCTACCA | SEQ ID NO: 77 |
| bv TF | | | |
| regulatory control | MYB binding site | (A/C)ACC(A/T)A(A/C)C | SEQ ID NO: 78 |
| by TF | promoter | | |
| regulatory control | MYB1 binding site | (A/C)TCC(A/T)ACC | SEQ ID NO: 79 |
| by TF | motif | | |
| regulatory control | MYB2 binding site | TAACT(G/C)GTT | SEQ ID NO: 80 |
| by TF | motif | | |
| regulatory control | MYB3 binding site | TAACTAAC | SEQ ID NO: 81 |
| by TF | motif | | |
| regulatory control | MYB4 binding site | A(A/C)C(A/T)A(A/C)C | SEQ ID NO: 82 |
| by TF | motif | | |
| regulatory control | Nonamer promoter | AGATCGACG | SEQ ID NO: 83 |
| by TF | motif | | |
| regulatory control | OBF4, 5 binding site | ATCTTATGTCATTGATGACGACCTCC | SEQ ID NO: 84 |
| by TF | in GST6 | | |
| regulatory control | OBP-1, 4, 5 binding | TACACTTTTGG | SEQ ID NO: 85 |
| bv TF | site in GST6 | | |
| regulatory control | OCS promoter motif | TGACG(C/T)AAG(C/G)(A/G)(A/C)T(G/T)ACG(C/T)(A/C)(A/C) | SEQ ID NO: 86 |
| by TF | | | |
| regulatory control | octamer promoter | CGCGGATC | SEQ ID NO: 87 |
| bv TF | motif | | |
| regulatory control | PI promoter motif | GTGATCAC | SEQ ID NO: 88 |
| by TF | | | |
| regulatory control | PII promoter motif | TTGGTTTTGATCAAAACCAA | SEQ ID NO: 89 |
| by TF | | | |
| regulatory control | PRHA binding site in | TAATTGACTCAATTA | SEQ ID NO: 90 |
| by TF | PALI | | |
| regulatory control | RAVI-A binding site | CAACA | SEQ ID NO: 91 |
| by TF | motif | | |
| regulatory control | RAVI-B binding site | CACCTG | SEQ ID NO: 92 |
| by TF | motif | | |
| regulatory control | RY-repeat promoter | CATGCATG | SEQ ID NO: 93 |
| by TF | motif | | |
| regulatory control | SBP-box promoter | TNCGTACAA | SEQ ID NO: 94 |
| by TF | motif | | |
| regulatory control | T-box promoter | ACTTTG | SEQ ID NO: 95 |
| bv TF | motif | | |
| regulatory control | TEF-box promoter | AGGGGCATAATGGTAA | SEQ ID NO: 96 |
| by TF | motif | | |
| regulatory control | TELO-box promoter | AAACCCTAA | SEQ ID NO: 97 |
| by TF | motif | | |
| regulatory control | TGA1 binding site | TGACGTGG | SEQ ID NO: 98 |
| by TF | motif | | |
| regulatory control | W-box promoter | TTGAC | SEQ ID NO: 99 |
| by TF | motif | | |
| regulatory control | Z-box promoter | ATACGTGT | SEQ ID NO: 100 |
| by TF | motif | | |
| regulatory control | AG binding site in | AAAACAGAATAGGAAA | SEQ ID NO: 101 |
| by TF | SPL/NOZ | | |
| regulatory control | Bellringer/replumless | AAATTAAA | SEQ ID NO: 102 |
| by TF | /pennywise binding | | |
| | site IN AG | | |
| regulatory control | Bellringer/replumless | AAATTAGT | SEQ ID NO: 103 |
| by TF | /pennywise binding | | |
| | site 2 in AG | | |
| regulatory control | Bellringer/replumless | ACTAATTT | SEQ ID NO: 104 |
| by TF | /pennywise binding | | |
| | site 3 in AG | | |
| regulatory control | AGL15 binding site | CCAATTTAATGG | SEQ ID NO: 105 |
| by TF | in AtGA2ox6 | | |
| regulatory control | ATB2/AtbZIP53/Atb | ACTCAT | SEQ ID NO: 106 |
| by TF | ZIP44/GBF5 binding | | |
| | site in ProDH | | |
| regulatory control | LFY binding site in | CTTAAACCCTAGGGGTAAT | SEQ ID NO: 107 |
| bv TF | AP3 | | |
| regulatory control | SORLREPI | TT(A/T)TACTAGT | SEQ ID NO: 108 |
| by TF | | | |
| regulatory control | SORLREP2 | ATAAAACGT | SEQ ID NO: 109 |
| by TF | | | |
| regulatory control | SORLREP3 | TGTATATAT | SEQ ID NO: 110 |
| by TF | | | |
| regulatory control | SORLREP4 | CTCCTAATT | SEQ ID NO: 111 |
| by TF | | | |
| regulatory control | SORLREP5 | TTGCATGACT | SEQ ID NO: 112 |
| by TF | | | |
| regulatory control | SORLIPI | AGCCAC | SEQ ID NO: 113 |
| by TF | | | |
| regulatory control | SORLIP2 | GGGCC | SEQ ID NO: 114 |
| by TF | | | |
| regulatory control | SORLIP3 | CTCAAGTGA | SEQ ID NO: 115 |
| by TF | | | |
| regulatory control | SORLIP4 | GTATGATGG | SEQ ID NO: 116 |
| by TF | | | |
| regulatory control | SORLIPS | GAGTGAG | SEQ ID NO: 117 |
| by TF | | | |
| regulatory control | ABFs binding site | CACGTGGC | SEQ ID NO: 118 |
| by TF | motif | | |
| down | Ndel restriction site | GTTTAATTGAGTTGTCATATGTTAATAACGGTAT | SEQ ID NO: 119 |
| down | Ndel restriction site | ATACCGTTATTAACATATGACAACTCAATTAAAC | SEQ ID NO: 120 |
| up (auxin | 3xDR5 auxin- | CCGACAAAAGGCCGACAAAAGGCCGACAAAAGGT | SEQ ID NO: 121 |
| responsive) | response element | | |
| up (auxin | 3xDR5 auxin- | ACCTTTTGTCGGCCTTTTGTCGGCCTTTTGTCGG | SEQ ID NO: 122 |
| responsive) | response element | | |
| up (auxin | 6xDR5 auxin- | GCCGACAAAAGGCCGACAAAAGGCCGACAAAAGGCCGACAAAAGGCCGACA | SEQ ID NO: 123 |
| responsive) | responsive element | AAAGGCCGACAAAAGGT | |
| up (auxin | 6xDR5 auxin- | ACCTTTTGTCGGCCTTTTGTCGGCCTTTTGTCGGCCTTTTGTCGGCCTTTTGTCG | SEQ ID NO: 124 |
| responsive) | responsive element | GCCTTTTGTCGGC | |
| up (auxin | 9xDR5 auxin- | CCGACAAAAGGCCGACAAAAGGCCGACAAAAGGCCGACAAAAGGCCGACAA | SEQ ID NO: 125 |
| responsive) | responsive element | AAGGCCGACAAAAGGCCGACAAAAGGCCGACAAAAGGCCGACAAAAGGT | |
| up (auxin | 9xDR5 auxin- | ACCTTTTGTCGGCCTTTTGTCGGCCTTTTGTCGGCCTTTTGTCGGCCTTTTGTCG | SEQ ID NO: 126 |
| responsive) | responsive element | GCCTTTTGTCGGCCTTTTGTCGGCCTTTTGTCGGCCTTTTGTCGG | |
| Cre recombinase | LoxP (wild-type 1) | ATAACTTCGTATAGCATACATTATACGAAGTTAT | SEQ ID NO: 127 |
| recognition site | | | |
| Cre recombinase | LoxP (wild-type 2) | ATAACTTCGTATAATGTATGCTATACGAAGTTAT | SEQ ID NO: 128 |
| recognition site | | | |
| Cre recombinase | Canonical LoxP | ATAACTTCGTATANNNTANNNTATACGAAGTTAT | SEQ ID NO: 129 |
| recognition site | | | |
| Cre recombinase | Lox 511 | ATAACTTCGTATAATGTATaCTATACGAAGTTAT | SEQ ID NO: 130 |
| recognition site | | | |
| Cre recombinase | Lox 5171 | ATAACTTCGTATAATGTgTaCTATACGAAGTTAT | SEQ ID NO: 131 |
| recognition site | | | |
| Cre recombinase | Lox 2272 | ATAACTTCGTATAAaGTATcCTATACGAAGTTAT | SEQ ID NO: 132 |
| recognition site | | | |
| Cre recombinase | M2 | ATAACTTCGTATAAgaaAccaTATACGAAGTTAT | SEQ ID NO: 133 |
| recognition site | | | |
| Cre recombinase | M3 | ATAACTTCGTATAtaaTACCATATACGAAGTTAT | SEQ ID NO: 134 |
| recognition site | | | |
| Cre recombinase | M7 | ATAACTTCGTATAAgaTAGAATATACGAAGTTAT | SEQ ID NO: 135 |
| recognition site | | | |
| Cre recombinase | MI1 | ATAACTTCGTATAaGATAgaaTATACGAAGTTAT | SEQ ID NO: 136 |
| recognition site | | | |
| Cre recombinase | Lox 71 | taccgTTCGTATANNNTANNNTATACGAAGTTAT | SEQ ID NO: 137 |
| recognition site | | | |
| Cre recombinase | Lox 66 | ATAACTTCGTATANNNTANNNTATACGAAcggta | SEQ ID NO: 138 |
| recognition site | | | |
| maize ovule/early | miR156j recognition | GTGCTCTCTCTCTTCTGTCA | SEQ ID NO: 139 |
| kernel transcript | site | | |
| down-regulation | | | |
| maize ovule/early | miR.156j recognition | CTGCTCTCTCTCTTCTGTCA | SEQ ID NO: 140 |
| kernel transcript | site | | |
| down-regulation | | | |
| maize ovule/early | miR 156j recognition | TTGCTTACTCTCTTCTGTCA | SEQ ID NO: 141 |
| kernel transcript | site | | |
| down-regulation | | | |
| maize ovule/early | miR 156j recognition | CCGCTCTCTCTCTTCTGTCA | SEQ ID NO: 142 |
| kernel transcript | site | | |
| down-regulation | | | |
| maize ovule/early | miR159c recognition | TGGAGCTCCCTTCATTCCAAT | SEQ ID NO: 143 |
| kernel transcript | site | | |
| down-regulation | | | |
| maize ovule/early | miR159c recognition | TCGAGTTCCCTTCATTCCAAT | SEQ ID NO: 144 |
| kernel transcript | site | | |
| down-regulation | | | |
| maize ovule/early | miR159c recognition | ATGAGCTCTCTTCAAACCAAA | SEQ ID NO: 145 |
| kernel transcript | site | | |
| down-regulation | | | |
| maize ovule/early | miR 159c recognition | TGGAGCTCCCTTCATTCCAAG | SEQ ID NO: 146 |
| kernel transcript | site | | |
| down-regulation | | | |
| maize ovule/early | miR 159c recognition | TAGAGCTTCCTICAAACCAAA | SEQ ID NO: 147 |
| kernel transcript | site | | |
| down-regulation | | | |
| maize ovule/early | miR159c recognition | TGGAGCTCCATTCGATCCAAA | SEQ ID NO: 148 |
| kernel transcript | site | | |
| down-regulation | | | |
| maize ovule/early | miR159c recognition | AGCAGCTCCCTTCAAACCAAA | SEQ ID NO: 149 |
| kernel transcript | site | | |
| down-regulation | | | |
| maize ovule/early | miR 159c recognition | CAGAGCTCCCTTCACTCCAAT | SEQ ID NO: 150 |
| kernel transcript | site | | |
| down-regulation | | | |
| maize ovule/early | miR 159c recognition | TGGAGCTCCCTTCACTCCAAT | SEQ ID NO: 151 |
| kernel transcript | site | | |
| down-regulation | | | |
| maize ovule/early | miR159c recognition | TGGAGCTCCCTTCACTCCAAG | SEQ ID NO: 152 |
| kernel transcript | site | | |
| down-regulation | | | |
| maize ovule/early | miR159c recognition | TGGAGCTCCCTTTAATCCAAT | SEQ ID NO: 153 |
| kernel transcript | site | | |
| down-regulation | | | |
| maize embryo | miR 166b recognition | TTGGGATGAAGCCTGGTCCGG | SEQ ID NO: 154 |
| transcript down- | site | | |
| regulation | | | |
| maize embryo | miR166b recognition | CTGGGATGAAGCCTGGTCCGG | SEQ ID NO: 155 |
| transcript down- | site | | |
| regulation | | | |
| maize embryo | miR166b recognition | CTGGAATGAAGCCTGGTCCGG | SEQ ID NO: 156 |
| transcript down- | site | | |
| regulation | | | |
| maize embryo | miR.166b recognition | CGGGATGAAGCCTGGTCCGG | SEQ ID NO: 157 |
| transcript down- | site | | |
| regulation | | | |
| maize endosperm | miR 167g recognition | GAGATCAGGCTGGCAGCTTGT | SEQ ID NO: 158 |
| transcript down- | site | | |
| regulation | | | |
| maize endosperm | miR 167g recognition | TAGATCAGGCTGGCAGCTTGT | SEQ ID NO: 159 |
| transcript down- | site | | |
| regulation | | | |
| maize endosperm | miR167g recognition | AAGATCAGGCTGGCAGCTTGT | SEQ ID NO: 160 |
| transcript down- | site | | |
| regulation | | | |
| maize pollen | miR156i recognition | GTGCTCTCTCTCTTCTGTCA | SEQ ID NO: 161 |
| transcript down- | site | | |
| regulation | | | |
| maize pollen | miR 156i recognition | CTGCTCTCTCTCTTCTGTCA | SEQ ID NO: 162 |
| transcript down- | site | | |
| regulation | | | |
| maize pollen | miR 156i recognition | TTGCTTACTCTCTTCTGTCA | SEQ ID NO: 163 |
| transcript down- | site | | |
| regulation | | | |
| maize pollen | miR156i recognition | CCGCTCTCTCTCTTCTGTCA | SEQ ID NO: 164 |
| transcript down- | site | | |
| regulation | | | |
| maize pollen | mir160b-like | TGGCATGCAGGGAGCCAGGCA | SEQ ID NO: 165 |
| transcript down- | recognition site | | |
| regulation | | | |
| maize pollen | mir160b-like | AGGAATACAGGGAGCCAGGCA | SEQ ID NO: 166 |
| transcript down- | recognition site | | |
| regulation | | | |
| maize pollen | mir160b-like | GGGTTTACAGGGAGCCAGGCA | SEQ ID NO: 167 |
| transcript down- | recognition site | | |
| regulation | | | |
| maize pollen | mir160b-like | AGGCATACAGGGAGCCAGGCA | SEQ ID NO: 168 |
| transcript down- | recognition site | | |
| regulation | | | |
| maize pollen | miR393a recognition | AAACAATGCGATCCCTTTGGA | SEQ ID NO: 169 |
| transcript down- | site | | |
| regulation | | | |
| maize pollen | miR393a recognition | AGACCATGCGATCCCTTTGGA | SEQ ID NO: 170 |
| transcript down- | site | | |
| regulation | | | |
| maize pollen | miR393a recognition | GGTCAGAGCGATCCCTTTGGC | SEQ ID NO: 171 |
| transcript down- | site | | |
| regulation | | | |
| maize pollen | miR393a recognition | AGACAATGCGATCCCTTTGGA | SEQ ID NO: 172 |
| transcript down- | site | | |
| regulation | | | |
| maize pollen | miR396a recognition | TCGTTCAAGAAAGCCTGTGGAA | SEQ ID NO: 173 |
| transcript down- | site | | |
| regulation | | | |
| maize pollen | miR396a recognition | CGTTCAAGAAAGCCTGTGGAA | SEQ ID NO: 174 |
| transcript down- | site | | |
| regulation | | | |
| maize pollen | miR396a recognition | TCGTTCAAGAAAGCATGTGGAA | SEQ ID NO: 175 |
| transcript down- | site | | |
| regulation | | | |
| maize pollen | miR396a recognition | ACGTTCAAGAAAGCTTGTGGAA | SEQ ID NO: 176 |
| transcript down- | site | | |
| regulation | | | |
| maize pollen | miR396a recognition | CGTTCAAGAAAGCCTGTGGAA | SEQ ID NO: 177 |
| transcript down- | site | | |
| regulation | | | |
| maize male tissue | male tissue-specific | GGACAACAAGCACCTTCTTGCCTTGCAAGGCCTCCCTTCCCTATGGTAGCCACT | SEQ ID NO: 178 |
| transcript down- | SIRNA element | TGAGTGGATGACTTCACCTTAAAGCTATTGATTCCCTAAGTGCCAGACATAATA | |
| regulation | | GGCTATACATTCTCTCTGGTGGCAACAATGAGCCATTTTGGTTGGTGTGGTAGT | |
| | | CTATTATTGAGTTTTTTTTGGCACCGTACTCCCATGGAGAGTAGAAGACAAACT | |
| | | CTTCACCGTTGTAGTCGTTGATGGTATTGGTGGTGACGACATCCTTGGTGTGCA | |
| | | TGCACTGGTGAGTCACTGTTGTACTCGGCG | |
| maize male tissue | male tissue-specific | GGACAACAAGCACCTTCTTGCCTTGCAAGGCCTCCCTTCCCTATGGTAGCCACT | SEQ ID NO: 179 |
| transcript down- | SIRNA element | TGAGTGGATGACTTCACCTTAAAGCTATCGATTCCCTAAGTGCCAGACAT | |
| regulation | | | |
| maize male tissue | male tissue-specific | CTCTTCACCGTTGTAGTCGTTGATGGTATTGGTGGTGACGACATCCTTGGTGTG | SEQ ID NO: 180 |
| transcript down- | siRNA element | CATGCACTGGTGAGTCACTGTTGTAC | |
| regulation | | | |
| maize male tissue | male tissue-specific | GGACAACAAGCACCTTCTTGCCTTGCAAGGCCTCCCTTCCCTATGGTAGCCACT | SEQ ID NO: 181 |
| transcript down- | SIRNA element | TGAGTGGATGACTTCACCTTAAAGCTATCGATTCCCTAAGTGCCAGACATCTCT | |
| regulation | | TCACCGTTGTAGTCGTTGATGGTATTGGTGGTGACGACATCCTTGGTGTGCATG | |
| | | CACTGGTGAGTCACTGTTGTAC | |
| maize male tissue | male tissue-specific | CTCTTCACCGTTGTAGTCGTTGATGGTATTGGTGGTGACGACATCCTTGGTGTG | SEQ ID NO: 182 |
| transcript down- | SIRNA element | CATGCACTGGTGAGTCACTGTTGTACGGACAACAAGCACCTTCTTGCCTTGCAA | |
| regulation | | GGCCTCCCTTCCCTATGGTAGCCACTTGAGTGGATGACTTCACCTTAAAGCTAT | |
| | | CGATTCCCTAAGTGCCAGACAT | |
| up (auxin | ocs enhancer | ACGTAAGCGCTTACGT | SEQ ID NO: 183 |
| reponsive; | (Agrobacterium sp.) | | |
| constitutive) | | | |
| up (auxin | 12-nt ocs orthologue | GTAAGCGCTTAC | SEQ ID NO: 184 |
| reponsive; | (Zea mays) | | |
| constitutive) | | | |
| up (nitrogen | AINRE | AAGAGATGAGCTCTTGAGCAATGTAAAGGGTCAAGTIGTTTCT | SEQ ID NO: 185 |
| responsive) | | | |
| up (nitrogen | AtNRE | AGAAACAACTTGACCCTTTACATTGCTCAAGAGCTCATCTCTT | SEQ ID NO: 186 |
| responsive) | | | |
| up (auxin | 3xDR5 auxin- | ACCUUUUGUCGGCCUUUUGUCGGCCUUUUGUCGG | SEQ ID NO: 187 |
| responsive) | response element; | | |
| | RNA strand of | | |
| | RNA/DNA hybid | | |
| up (auxin | 3xDRS auxin- | TCGGTCCGACAAAAGGCCGACAAAAGGCGGACAAAAGG | SEQ ID NO: 188 |
| responsive) | response element; | | |
| | sticky-ended | | |
| up (auxin | 3xDR5 auxin- | ACCGACCTTTTGTCGGCCTTTTGTCGGCCTTTTGTCGG | SEQ ID NO: 189 |
| responsive) | response element; | | |
| | sticky-ended | | |
| down or up | OsTBF1 uORF2 | ATGGGAGTAGAGGCGGGCGGCGGCTGCGGTGGGAGGGCGGTAGTCACCGGAT | SEQ ID NO: 190 |
| (MAMP- | | TCTACGTCTGGGGCTGGGAGTTCCTCACCGCCCTCCTGCTCTTCTCGGCCACCA | |
| responsive) | | CCTCCTACTAG | |
| down or up | synthetic R-motif | AAAAAAAAAAAAAAA | SEQ ID NO: 191 |
| (MAMP- | | | |
| responsive) | | | |
| down or up | AtTBF1 R-motif | CACATACACACAAAAATAAAAAAGA | SEQ ID NO: 192 |
| (MAMP- | | | |
| responsive) | | | |
| decreases | insulator | GAATATATATATATTC | SEQ ID NO: 193 |
| upregulation | | | |
| sequence | ZmEPSPS exon 1 | GTGAACAACCTTATGAAATTTGGGCGCATAACTTCGTATAGCATACATTATACG | SEQ ID NO: 194 |
| modification | with two point | AAGTTATAAAGAACTCGCCCTCAAGGGTTGATCTTATGCCATCGTCATGATAA | |
| | mutations and | ACAGTGGAGCACGGACGATCCTTTACGTTGTTTTTAACAAACTTTGTCAGAAAA | |
| | heterospecific lox | CTAGCATCATTAACTTCTTAATGACGATTTCACAACAAAAAAAGGTAACCTCG | |
| | sites | CTACTAACATAACAAAATACTTGTTGCTTATTAATTATATGTTTTTTAATCTTTG | |
| | | ATCAGGGGACAACAGTGGTTGATAACCTGTTGAACAGTGAGGATGTCCACTAC | |
| | | ATGCTCGGGGCCTTGAGGACTCTTGGTCTCTCTGTCGAAGCGGACAAAGCTGC | |
| | | CAAAAGAGCTGTAGTTGTTGGCTGTGGTGGAAAGTTCCCAGTTGAGGATTCTA | |
| | | AAGAGGAAGTGCAGCTCTTCTTGGGGAATGCTGGAATTGCAATGCGGGCATTG | |
| | | ACAGCAGCTGTTACTGCTGCTGGTGGAAATGCAACGTATGTTTCCTCTCTTTCT | |
| | | CTCTACAATACTTGCATAACTTCGTATAAAGTATCCTATACGAAGTTATTGGAG | |
| | | TTAGTATGAAACCCATGGGTATGTCTAGT | |
| decreases | miniature inverted- | TACTCCCTCCGTTTCTTTTTATTAGTCGCTGGATAGTGCAATTTTGCACTATCCA | SEQ ID NO: 195 |
| upregulation | repeat transposable | GCGACTAATAAAAAGAAACGGAGGGAGTA | |
| | element (“MITE”) | | |
| decreases | miniature inverted- | TACTCCCTCCGTTTCTTTTTATTAGTCGCTGGATAGTGCAAAATTGCACTATCCA | SEQ ID NO: 196 |
| upregulation | repeat transposable | GCGACTAATAAAAAGAAACGGAGGGAGTA | |
| | element (“MITE”) | | |
| up (constitutive) | G-box | ACACGTGACACGTGACACGTGACACGTG | SEQ ID NO: 197 |
| decreased | mRNA destabilizing | TTATTTATTTTATTTATTTTATTTATTTTATTTATT | SEQ ID NO: 198 |
| transcript stability | element | | |
| | (mammalian) | | |
| decreased | mRNA destabilizing | AATTTTAATTTTAATTTTAATTTTAATTTTAATTTT | SEQ ID NO: 199 |
| transcript stability | element (Arabidopsis | | |
| | thaliana) | | |
| increased | mRNA stabilizing | TCTCTTTCTCTTTCTCTTTCTCTTTCTCTTTCTCTT | SEQ ID NO: 200 |
| transcript stability | element | | |
| down | SHAT1-repressor | ATTAAAAAAATAAATAAGATATTATTAAAAAAATAAATAAGATATTATTAAAA | SEQ ID NO: 201 |
| | | AAATAAATAAGATATTATTAAAAAAATAAATAAGATATT | |
| decreased | SAUR mRNA | AGATCTAGGAGACTGACATAGATTGGAGGAGACATTTTGTATAATAAGATCTA | SEQ ID NO: 202 |
| transcript stability | destabilizing element | GGAGACTGACATAGATTGGAGGAGACATTTTGTATAATA | |
| down by recruiting | CTCC | CTCC(T/A/G)CC(G/T/A) | SEQ ID NO: 203 |
| transcription | | | |
| factors interacting | | | |
| with PRC2 | | | |
| down by recruiting | CCG | (C/T/A)(G/T)C(C/A)(G/A)(C/A)C(G/T)(C/A) | SEQ ID NO: 204 |
| transcription | | | |
| factors interacting | | | |
| with PRC2 | | | |
| down by recruiting | G-box | (C/G)ACGTGGNN(G/A/C)(T/A) | SEQ ID NO: 205 |
| transcription | | | |
| factors interacting | | | |
| with PRC2 | | | |
| down by recruiting | GA repeat | A(G/A)A(G/A)AGA(G/A)(A/G) | SEQ ID NO: 206 |
| transcription | | | |
| factors interacting | | | |
| with PRC2 | | | |
| down by recruiting | AC-rich | CA(A/T/C)CA(C/A)CA(A/C/T) | SEQ ID NO: 207 |
| transcription | | | |
| factors interacting | | | |
| with PRC2 | | | |
| down by recruiting | Telobox | (A/G)AACCC(T/A)A(A/G) | SEQ ID NO: 208 |
| transcription | | | |
| factors interacting | | | |
| with PRC2 | | | |
| up (Pi starvation | P1BS | GNATATNC | SEQ ID NO: 209 |
| response) | | | |
| Up | OCS | GTAAGCGCTTAC | SEQ ID NO: 210 |
| Up | Gbox | GCCACGTGCCGCCACGTGCCGCCACGTGCCGCCACGTGCC | SEQ ID NO: 211 |
| Up | Green tissue-specific | AAAATATTTATAAAATATTTATAAAATATTTATAAAATATTTAT | SEQ ID NO: 212 |
| | promoter (GSP) | | |
| Up | E2F binding site | CCCGCCAAACCCGCCAAACCCGCCAAACCOGCCAAA | SEQ ID NO: 213 |
| Down | mRNA destablizing | AATTTTAATTTTAATTTTAATTTTAATTTTAATTTT | SEQ ID NO: 214 |
| | element | | |
| Down | Silencer | GAATATATATATATTC | SEQ ID NO: 215 |

TABLE 10

| Trait | Gene(s) | Gene ID | Gene Product | Expression Change | Gene SEQ ID | Protein SEQ ID |
|---|---|---|---|---|---|---|
| Abiotic stress | DREB1-like | 547622 | Protein | Increase | SEQ ID NO: 235 | SEQ ID NO: 456 |
| Abiotic stress | DREB1 | 547642 | Protein | Increase | SEQ ID NO: 236 | SEQ ID NO: 457 |
| Abiotic stress | NRP-A | 547685 | Protein | Increase | SEQ ID NO: 237 | SEQ ID NO: 458 |
| Abiotic stress | PAP3 | 547708 | Protein | Increase | SEQ ID NO: 238 | SEQ ID NO: 459 |
| Abiotic stress | VSP25 | 547821 | Protein | Increase | SEQ ID NO: 239 | SEQ ID NO: 460 |
| Abiotic stress | MP2 | 547827 | Protein | Increase | SEQ ID NO: 240 | SEQ ID NO: 461 |
| Abiotic stress | BIP | 547839 | Protein | Increase | SEQ ID NO: 241 | SEQ ID NO: 462 |
| Abiotic stress | PPCK3 | 548089 | Protein | Increase | SEQ ID NO: 242 | SEQ ID NO: 463 |
| Abiotic stress | IFS2 | 606705 | Protein | Increase | SEQ ID NO: 243 | SEQ ID NO: 464 |
| Abiotic Stress | NAC81 | 732555 | Protein | Decrease | SEQ ID NO: 244 | SEQ ID NO: 465 |
| Abiotic stress | DREB2 | 732579 | Protein | Increase | SEQ ID NO: 245 | SEQ ID NO: 466 |
| Abiotic stress | LOC732608 | 732608 | Protein | Increase | SEQ ID NO: 246 | SEQ ID NO: 467 |
| Abiotic stress | LOC732656 | 732656 | Protein | Increase | SEQ ID NO: 247 | SEQ ID NO: 468 |
| Abiotic stress | LOC778160 | 778160 | Protein | Increase | SEQ ID NO: 248 | SEQ ID NO: 469 |
| Abiotic stress | BZIP132 | 778192 | Protein | Increase | SEQ ID NO: 249 | SEQ ID NO: 470 |
| Abiotic stress | GMWRKY46 | 100127375 | Protein | Increase | SEQ ID NO: 250 | SEQ ID NO: 471 |
| Abiotic stress | OSBP | 100137077 | Protein | Increase | SEQ ID NO: 251 | SEQ ID NO: 472 |
| Abiotic stress | GT-2B | 100137081 | Protein | Increase | SEQ ID NO: 252 | SEQ ID NO: 473 |
| Abiotic stress | NAC19 | 100170713 | Protein | Increase | SEQ ID NO: 253 | SEQ ID NO: 474 |
| Abiotic stress | LOC100170723 | 100170723 | Protein | Increase | SEQ ID NO: 254 | SEQ ID NO: 475 |
| Abiotic stress | GMRD22 | 100301893 | Protein | Increase | SEQ ID NO: 255 | SEQ ID NO: 476 |
| Abiotic stress | GSTU4 | 100527381 | Protein | Increase | SEQ ID NO: 256 | SEQ ID NO: 477 |
| Abiotic stress | LOC100776453 | 100776453 | Protein | Increase | SEQ ID NO: 257 | SEQ ID NO: 478 |
| Abiotic stress | LOC100779440 | 100779440 | Protein | Increase | SEQ ID NO: 258 | SEQ ID NO: 479 |
| Abiotic stress | GSK-3 | 100780226 | Protein | Increase | SEQ ID NO: 259 | SEQ ID NO: 480 |
| Abiotic stress | GMPIP1-6 | 100780356 | Protein | Increase | SEQ ID NO: 260 | SEQ ID NO: 481 |
| Abiotic stress | LOC100782841 | 100782841 | Protein | Increase | SEQ ID NO: 261 | SEQ ID NO: 482 |
| Abiotic stress | LOC100782841 | 100782841 | Protein | Increase | SEQ ID NO: 262 | SEQ ID NO: 483 |
| Abiotic stress | GMSIZ1B | 100793735 | Protein | Increase | SEQ ID NO: 263 | SEQ ID NO: 484 |
| Abiotic stress | LOC100794096 | 100794096 | Protein | Increase | SEQ ID NO: 264 | SEQ ID NO: 485 |
| Abiotic stress | GMPUB8 | 100795263 | Protein | Decrease | SEQ ID NO: 265 | SEQ ID NO: 486 |
| Abiotic Stress | GmRCAb | 100797222 | Protein | Change coding sequence | SEQ ID NO: 266 | SEQ ID NO: 487 |
| Abiotic stress | GMSIZ1A | 100797252 | Protein | Increase | SEQ ID NO: 267 | SEQ ID NO: 488 |
| Abiotic stress | AP2-7 | 100800134 | Protein | Increase | SEQ ID NO: 268 | SEQ ID NO: 489 |
| Abiotic stress | LOC100800453 | 100800453 | Protein | Increase | SEQ ID NO: 269 | SEQ ID NO: 490 |
| Abiotic stress | RFP1 | 100806337 | Protein | Increase | SEQ ID NO: 270 | SEQ ID NO: 491 |
| Abiotic Stress | GmPYL9 | 100810273 | Protein | Change coding sequence | SEQ ID NO: 271 | SEQ ID NO: 492 |
| Abiotic stress | LOC100812768 | 100812768 | Protein | Increase | SEQ ID NO: 272 | SEQ ID NO: 493 |
| Abiotic stress | LOC100819467 | 100819467 | Protein | Increase | SEQ ID NO: 273 | SEQ ID NO: 494 |
| Abiotic stress | GMHSF-34 | 100820298 | Protein | Increase | SEQ ID NO: 274 | SEQ ID NO: 495 |
| Abiotic stress | MIR172C | 100886233 | miRNA | Increase | SEQ ID NO: 275 | |
| Architecture | W1 | 547705 | Protein | Increase/Decrease | SEQ ID NO: 276 | SEQ ID NO: 497 |
| Architecture | ENOD55-2 | 547770 | Protein | Increase | SEQ ID NO: 277 | SEQ ID NO: 498 |
| Architecture | ENOD93 | 547773 | Protein | Increase | SEQ ID NO: 278 | SEQ ID NO: 499 |
| Architecture | CLV1B | 732625 | Protein | Decrease | SEQ ID NO: 279 | SEQ ID NO: 500 |
| Architecture | AKR1 | 100301897 | Protein | Decrease | SEQ ID NO: 280 | SEQ ID NO: 501 |
| Architecture | GMMFT | 100306314 | Protein | Increase/Decrease | SEQ ID NO: 281 | SEQ ID NO: 502 |
| Architecture | LOC100499629 | 100499629 | Protein | Increase/Decrease | SEQ ID NO: 282 | SEQ ID NO: 503 |
| Architecture | LOC100775555 | 100775555 | Protein | Increase | SEQ ID NO: 283 | SEQ ID NO: 504 |
| Architecture | Dt1 | 100776154 | Protein | Increase/Decrease | SEQ ID NO: 284 | SEQ ID NO: 505 |
| Architecture | GMFT3B | 100781509 | Protein | Increase/Decrease | SEQ ID NO: 285 | SEQ ID NO: 506 |
| Architecture | GS52 | 100781628 | Protein | Increase | SEQ ID NO: 286 | SEQ ID NO: 507 |
| Architecture | W2 | 100782308 | Protein | Increase/Decrease | SEQ ID NO: 287 | SEQ ID NO: 508 |
| Architecture | LOC100787444 | 100787444 | Protein | Decrease | SEQ ID NO: 288 | SEQ ID NO: 509 |
| Architecture | LOC100790763 | 100790763 | Protein | Increase/Decrease | SEQ ID NO: 289 | SEQ ID NO: 510 |
| Architecture | TFL1.1 | 100791809 | Protein | Decrease | SEQ ID NO: 290 | SEQ ID NO: 511 |
| Architecture | GMFT5A | 100796994 | Protein | Increase/Decrease | SEQ ID NO: 291 | SEQ ID NO: 512 |
| Architecture | GMFT3A | 100803909 | Protein | Increase/Decrease | SEQ ID NO: 292 | SEQ ID NO: 513 |
| Architecture | LOC100813937 | 100813937 | Protein | Decrease | SEQ ID NO: 293 | SEQ ID NO: 514 |
| Architecture | GMFT2A | 100814951 | Protein | Increase/Decrease | SEQ ID NO: 294 | SEQ ID NO: 515 |
| Architecture | LOC100818062 | 100818062 | Protein | Decrease | SEQ ID NO: 295 | SEQ ID NO: 516 |
| Architecture | LN | 102661548 | Protein | Increase/Decrease | SEQ ID NO: 296 | SEQ ID NO: 517 |
| Architecture | CLV3a | 102662349 | Protein | Decrease | SEQ ID NO: 297 | SEQ ID NO: 518 |
| Architecture | LOC102664687 | 102664687 | Protein | Increase/Decrease | SEQ ID NO: 298 | SEQ ID NO: 519 |
| Architecture | CLV3b | 102669448 | Protein | Decrease | SEQ ID NO: 299 | SEQ ID NO: 520 |
| Biotic stress | PDR12 | 547508 | Protein | Increase | SEQ ID NO: 300 | SEQ ID NO: 521 |
| Biotic stress | DREB1 | 547642 | Protein | Increase | SEQ ID NO: 301 | SEQ ID NO: 522 |
| Biotic stress | CYSTATIN | 547777 | Protein | Increase | SEQ ID NO: 302 | SEQ ID NO: 523 |
| Biotic stress | PRP | 547791 | Protein | Increase | SEQ ID NO: 303 | SEQ ID NO: 524 |
| Biotic stress | ACPD | 547808 | Protein | Decrease | SEQ ID NO: 304 | SEQ ID NO: 525 |
| Biotic stress | PGIP | 547838 | Protein | Increase | SEQ ID NO: 305 | SEQ ID NO: 526 |
| Biotic stress | L1 | 547875 | Protein | Increase | SEQ ID NO: 306 | SEQ ID NO: 527 |
| Biotic stress | LOC100818432 | 547983 | Protein | Increase | SEQ ID NO: 307 | SEQ ID NO: 528 |
| Biotic stress | MIPS | 548084 | Protein | Increase | SEQ ID NO: 308 | SEQ ID NO: 529 |
| Biotic stress | LOC100815291 | 732578 | Protein | Increase | SEQ ID NO: 309 | SEQ ID NO: 530 |
| Biotic stress | LOC100797842 | 3989271 | Protein | Increase | SEQ ID NO: 310 | |
| Biotic stress | N-36A | 3989355 | Protein | Decrease | SEQ ID NO: 311 | |
| Biotic stress | N2 | 15308528 | Protein | Increase | SEQ ID NO: 312 | |
| Biotic stress | LOC100797449 | 15308540 | Protein | Increase | SEQ ID NO: 313 | |
| Biotic stress | RHG1 | 100101892 | Protein | Increase | SEQ ID NO: 314 | SEQ ID NO: 535 |
| Biotic stress | G4DT | 100301896 | Protein | Increase | SEQ ID NO: 315 | SEQ ID NO: 536 |
| Biotic stress | PGIP4 | 100305373 | Protein | Increase | SEQ ID NO: 316 | SEQ ID NO: 537 |
| Biotic stress | RLK3 | 100499747 | Protein | Increase | SEQ ID NO: 317 | SEQ ID NO: 538 |
| Biotic stress | rps1 | 100500504 | Protein | Increase | SEQ ID NO: 318 | SEQ ID NO: 539 |
| Biotic stress | LOC100811309 | 100787186 | Protein | Decrease | SEQ ID NO: 319 | SEQ ID NO: 540 |
| Biotic stress | LOC100794096 | 100794096 | Protein | Increase | SEQ ID NO: 320 | SEQ ID NO: 541 |
| Biotic stress | LOC100795239 | 100795239 | Protein | Increase | SEQ ID NO: 321 | SEQ ID NO: 542 |
| Biotic stress | RLK | 100795799 | Protein | Increase | SEQ ID NO: 322 | SEQ ID NO: 543 |
| Biotic stress | VLXB | 100797716 | Protein | Increase | SEQ ID NO: 323 | SEQ ID NO: 544 |
| Biotic stress | LOC547834 | 100797843 | Protein | Increase | SEQ ID NO: 324 | SEQ ID NO: 545 |
| Biotic stress | NES | 100799695 | Protein | Increase | SEQ ID NO: 325 | SEQ ID NO: 546 |
| Biotic stress | LOC547704 | 100803679 | Protein | Increase | SEQ ID NO: 326 | SEQ ID NO: 547 |
| Biotic stress | HSP70 | 100816111 | Protein | Decrease | SEQ ID NO: 327 | SEQ ID NO: 548 |
| Biotic stress | GmDR1 | Glyma.10g094800 | Protein | Increase | SEQ ID NO: 762 | SEQ ID NO: 763 |
| Flowering Time | SOYAP1 | 547478 | Protein | Increase/Decrease | SEQ ID NO: 328 | SEQ ID NO: 549 |
| Flowering Time | PHYA | 547810 | Protein | Increase/Decrease | SEQ ID NO: 329 | SEQ ID NO: 550 |
| Flowering Time | LOC100037477 | 100037477 | Protein | Increase/Decrease | SEQ ID NO: 330 | SEQ ID NO: 551 |
| Flowering Time | CRY1a | 100233233 | Protein | Increase/Decrease | SEQ ID NO: 331 | SEQ ID NO: 552 |
| Flowering Time | TOC1 | 100271889 | Protein | Increase/Decrease | SEQ ID NO: 332 | SEQ ID NO: 553 |
| Flowering Time | COL2a | 100301885 | Protein | Increase/Decrease | SEQ ID NO: 333 | SEQ ID NO: 554 |
| Flowering Time | FKF1 | 100301889 | Protein | Increase/Decrease | SEQ ID NO: 334 | SEQ ID NO: 555 |
| Flowering Time | AGL11 | 100301905 | Protein | Increase/Decrease | SEQ ID NO: 335 | SEQ ID NO: 556 |
| Flowering Time | GMMFT | 100306314 | Protein | Increase/Decrease | SEQ ID NO: 336 | SEQ ID NO: 557 |
| Flowering Time | GIGANTEA | 100779044 | Protein | Increase/Decrease | SEQ ID NO: 337 | SEQ ID NO: 558 |
| Flowering Time | GMFT3B | 100781509 | Protein | Increase/Decrease | SEQ ID NO: 338 | SEQ ID NO: 559 |
| Flowering Time | FLD | 100786453 | Protein | Increase/Decrease | SEQ ID NO: 339 | SEQ ID NO: 560 |
| Flowering Time | ELF3A | 100793561 | Protein | Increase/Decrease | SEQ ID NO: 340 | SEQ ID NO: 561 |
| Flowering Time | CIB1 | 100794256 | Protein | Increase/Decrease | SEQ ID NO: 341 | SEQ ID NO: 562 |
| Flowering Time | GMFT5A | 100796994 | Protein | Increase/Decrease | SEQ ID NO: 342 | SEQ ID NO: 563 |
| Flowering Time | LOC100799720 | 100799720 | Protein | Increase/Decrease | SEQ ID NO: 343 | SEQ ID NO: 564 |
| Flowering Time | PHYB | 100799831 | Protein | Increase/Decrease | SEQ ID NO: 344 | SEQ ID NO: 565 |
| Flowering Time | GMGIA | 100800578 | Protein | Increase/Decrease | SEQ ID NO: 345 | SEQ ID NO: 566 |
| Flowering Time | LOC100801792 | 100801792 | Protein | Increase/Decrease | SEQ ID NO: 346 | SEQ ID NO: 567 |
| Flowering Time | GMFT3A | 100803909 | Protein | Increase/Decrease | SEQ ID NO: 347 | SEQ ID NO: 568 |
| Flowering Time | LOC100810415 | 100810415 | Protein | Increase/Decrease | SEQ ID NO: 348 | SEQ ID NO: 569 |
| Flowering Time | GMFT2A | 100814951 | Protein | Increase/Decrease | SEQ ID NO: 349 | SEQ ID NO: 570 |
| Flowering Time | LOC102666452 | 102666452 | Protein | Increase/Decrease | SEQ ID NO: 350 | SEQ ID NO: 571 |
| Flowering Time | LOC102667341 | 102667341 | Protein | Increase/Decrease | SEQ ID NO: 351 | SEQ ID NO: 572 |
| Flowering Time | LOC102670334 | 102670334 | Protein | Increase/Decrease | SEQ ID NO: 352 | SEQ ID NO: 573 |
| Nutrient use efficiency | MIPS | 547604 | Protein | Decrease | SEQ ID NO: 353 | SEQ ID NO: 574 |
| Nutrient use efficiency | DMT1 | 547711 | Protein | Increase | SEQ ID NO: 354 | SEQ ID NO: 575 |
| Nutrient use efficiency | LOX1.2 | 547774 | Protein | Decrease | SEQ ID NO: 355 | SEQ ID NO: 576 |
| Nutrient use efficiency | ACPD | 547808 | Protein | Decrease | SEQ ID NO: 356 | SEQ ID NO: 577 |
| Nutrient use efficiency | LOX1.3 | 547869 | Protein | Knockout/Decrease | SEQ ID NO: 357 | SEQ ID NO: 578 |
| Nutrient use efficiency | AS2 | 547894 | Protein | Increase | SEQ ID NO: 358 | SEQ ID NO: 579 |
| Nutrient use efficiency | AS1 | 547895 | Protein | Increase | SEQ ID NO: 359 | SEQ ID NO: 580 |
| Nutrient use efficiency | LOX1.1 | 547923 | Protein | Knockout/Decrease | SEQ ID NO: 360 | SEQ ID NO: 581 |
| Nutrient use efficiency | LOC547940 | 547940 | Protein | Increase | SEQ ID NO: 361 | SEQ ID NO: 582 |
| Nutrient use efficiency | NRT2 | 547946 | Protein | Increase | SEQ ID NO: 362 | SEQ ID NO: 583 |
| Nutrient use efficiency | GS | 548082 | Protein | Increase | SEQ ID NO: 363 | SEQ ID NO: 584 |
| Nutrient use efficiency | IPK1 | 100127406 | Protein | Knockout/Decrease | SEQ ID NO: 364 | SEQ ID NO: 585 |
| Nutrient use efficiency | SAD2 | 100217331 | Protein | Decrease | SEQ ID NO: 365 | SEQ ID NO: 586 |
| Nutrient use efficiency | LOC100527257 | 100527257 | Protein | Increase | SEQ ID NO: 366 | SEQ ID NO: 587 |
| Nutrient use efficiency | LOC100775983 | 100775983 | Protein | Increase | SEQ ID NO: 367 | SEQ ID NO: 588 |
| Nutrient use efficiency | PHR1 | 100783132 | Protein | Increase | SEQ ID NO: 368 | SEQ ID NO: 589 |
| Nutrient use efficiency | GMPT5 | 100786638 | Protein | Increase | SEQ ID NO: 369 | SEQ ID NO: 590 |
| Nutrient use efficiency | PAP4 | 100790529 | Protein | Increase | SEQ ID NO: 370 | SEQ ID NO: 591 |
| Photosynthesis | VDE | 100778118 | Protein | Increase | SEQ ID NO: 371 | SEQ ID NO: 592 |
| Photosynthesis | PSBS | 100779417 | Protein | Increase | SEQ ID NO: 372 | SEQ ID NO: 593 |
| Photosynthesis | ZEP | 100800186 | Protein | Increase | SEQ ID NO: 373 | SEQ ID NO: 594 |
| Photosynthesis | PSBS | 100807355 | Protein | Increase | SEQ ID NO: 374 | SEQ ID NO: 595 |
| Photosynthesis | VDE | 100816085 | Protein | Increase | SEQ ID NO: 375 | SEQ ID NO: 596 |
| Photosynthesis | ZEP | 100820171 | Protein | Increase | SEQ ID NO: 376 | SEQ ID NO: 597 |
| Photosynthesis | DREB1 | 547642 | Protein | Increase | SEQ ID NO: 377 | SEQ ID NO: 598 |
| Photosynthesis | VPE | 547964 | Protein | Increase | SEQ ID NO: 378 | SEQ ID NO: 599 |
| Photosynthesis | PIP | 100811119 | Protein | Increase | SEQ ID NO: 379 | SEQ ID NO: 600 |
| Resource partitioning | AO | 547647 | Protein | Increase | SEQ ID NO: 380 | SEQ ID NO: 601 |
| Resource partitioning | ACPD | 547808 | Protein | Decrease | SEQ ID NO: 381 | SEQ ID NO: 602 |
| Resource partitioning | FBP | 547809 | Protein | Increase | SEQ ID NO: 382 | SEQ ID NO: 603 |
| Resource partitioning | AS1 | 547895 | Protein | Increase | SEQ ID NO: 383 | SEQ ID NO: 604 |
| Resource partitioning | REDUCTASE | 547911 | Protein | Increase | SEQ ID NO: 384 | SEQ ID NO: 605 |
| Resource partitioning | LOC547940 | 547940 | Protein | Increase | SEQ ID NO: 385 | SEQ ID NO: 606 |
| Resource partitioning | DGAT1C | 547982 | Protein | Increase/Decrease | SEQ ID NO: 386 | SEQ ID NO: 607 |
| Resource partitioning | DGAT1C | 547982 | Protein | Increase/Decrease | SEQ ID NO: 387 | SEQ ID NO: 608 |
| Resource partitioning | DGAT1A | 548005 | Protein | Increase/Decrease | SEQ ID NO: 388 | SEQ ID NO: 609 |
| Resource partitioning | DGAT1A | 548005 | Protein | Increase/Decrease | SEQ ID NO: 389 | SEQ ID NO: 610 |
| Resource partitioning | GOLS | 548050 | Protein | Decrease | SEQ ID NO: 390 | SEQ ID NO: 611 |
| Resource partitioning | BBI | 548083 | Protein | Decrease | SEQ ID NO: 391 | SEQ ID NO: 612 |
| Resource partitioning | DGAT1B | 732606 | Protein | Increase/Decrease | SEQ ID NO: 392 | SEQ ID NO: 613 |
| Resource partitioning | Dof4 | 778097 | Protein | Increase | SEQ ID NO: 393 | SEQ ID NO: 614 |
| Resource partitioning | MYB73 | 778179 | Protein | Increase/Decrease | SEQ ID NO: 394 | SEQ ID NO: 615 |
| Resource partitioning | IFS1 | 100037450 | Protein | Increase | SEQ ID NO: 395 | SEQ ID NO: 616 |
| Resource partitioning | SACPD-C | 100037478 | Protein | Increase/Decrease | SEQ ID NO: 396 | SEQ ID NO: 617 |
| Resource partitioning | FAD3 | 100038323 | Protein | Increase/Decrease | | SEQ ID NO: 618 |
| Resource partitioning | AAH1 | 100137075 | Protein | Increase | SEQ ID NO: 398 | SEQ ID NO: 619 |
| Resource partitioning | LOC100194415 | 100194415 | Protein | Increase | SEQ ID NO: 399 | SEQ ID NO: 620 |
| Resource partitioning | COL2a | 100301885 | Protein | Regulate for Flowering | SEQ ID NO: 400 | SEQ ID NO: 621 |
| Resource partitioning | CYP73A11 | 100499623 | Protein | Increase | SEQ ID NO: 401 | SEQ ID NO: 622 |
| Resource partitioning | LOC100499629 | 100499629 | Protein | Decrease | SEQ ID NO: 402 | SEQ ID NO: 623 |
| Resource partitioning | LOC100775672 | 100775672 | Protein | Increase | SEQ ID NO: 403 | SEQ ID NO: 624 |
| Resource partitioning | LOC100775983 | 100775983 | Protein | Increase | SEQ ID NO: 404 | SEQ ID NO: 625 |
| Resource partitioning | PHYTASE | 100778145 | Protein | Increase | SEQ ID NO: 405 | SEQ ID NO: 626 |
| Resource partitioning | LOC100783693 | 100783693 | Protein | Increase | SEQ ID NO: 406 | SEQ ID NO: 627 |
| Resource partitioning | LOC100788179 | 100788179 | Protein | Increase | SEQ ID NO: 407 | SEQ ID NO: 628 |
| Resource partitioning | TFL1.1 | 100791809 | Protein | Regulate for Flowering | SEQ ID NO: 408 | SEQ ID NO: 629 |
| Resource partitioning | LOC100797018 | 100797018 | Protein | Increase | SEQ ID NO: 409 | SEQ ID NO: 630 |
| Resource partitioning | LOC100799931 | 100799931 | Protein | Increase | SEQ ID NO: 410 | SEQ ID NO: 631 |
| Resource partitioning | LOC100800931 | 100800931 | Protein | Increase | SEQ ID NO: 411 | SEQ ID NO: 632 |
| Resource partitioning | LOC100803398 | 100803398 | Protein | Increase | SEQ ID NO: 412 | SEQ ID NO: 633 |
| Resource partitioning | FAD2 | 100805777 | Protein | Increase/Decrease | SEQ ID NO: 413 | SEQ ID NO: 634 |
| Resource partitioning | LOC100807749 | 100807749 | Protein | Increase | SEQ ID NO: 414 | SEQ ID NO: 635 |
| Resource partitioning | LOC100809706 | 100809706 | Protein | Increase | SEQ ID NO: 415 | SEQ ID NO: 636 |
| Resource partitioning | LOC100813937 | 100813937 | Protein | Decrease | SEQ ID NO: 416 | SEQ ID NO: 637 |
| Resource partitioning | LOC100814531 | 100814531 | Protein | Increase | SEQ ID NO: 417 | SEQ ID NO: 638 |
| Resource partitioning | GMFT2A | 100814951 | Protein | Increase/Decrease | SEQ ID NO: 418 | SEQ ID NO: 639 |
| Resource partitioning | LOC102666452 | 102666452 | Protein | Regulate for Flowering | SEQ ID NO: 419 | SEQ ID NO: 640 |
| Senescence | GST | 547580 | Protein | Decrease | SEQ ID NO: 420 | SEQ ID NO: 641 |
| Senescence | NRP-A | 547685 | Protein | Increase/Decrease | SEQ ID NO: 421 | SEQ ID NO: 642 |
| Senescence | PGIP | 547838 | Protein | Increase/Decrease | SEQ ID NO: 422 | SEQ ID NO: 643 |
| Senescence | VPE | 547964 | Protein | Decrease | SEQ ID NO: 423 | SEQ ID NO: 644 |
| Senescence | NAC2 | 732553 | Protein | Decrease | SEQ ID NO: 424 | SEQ ID NO: 645 |
| Senescence | SGR1 | 732647 | Protein | Increase | SEQ ID NO: 425 | SEQ ID NO: 646 |
| Senescence | petB | 3989327 | Protein | Increase | SEQ ID NO: 426 | |
| Senescence | SAN1A | 100101864 | Protein | Decrease | SEQ ID NO: 427 | SEQ ID NO: 648 |
| Senescence | LOC100233234 | 100233234 | Protein | Increase/Decrease | SEQ ID NO: 428 | SEQ ID NO: 649 |
| Senescence | GMSGR | 100301892 | Protein | Increase | SEQ ID NO: 429 | SEQ ID NO: 650 |
| Senescence | CIB1 | 100794256 | Protein | Increase/Decrease | SEQ ID NO: 430 | SEQ ID NO: 651 |
| Senescence | LOC100808627 | 100808627 | Protein | Increase/Decrease | SEQ ID NO: 431 | SEQ ID NO: 652 |
| Senescence | SAN1B | 100810801 | Protein | Increase | SEQ ID NO: 432 | SEQ ID NO: 653 |
| Senescence | GMCRY2B | 100811759 | Protein | Increase/Decrease | SEQ ID NO: 433 | SEQ ID NO: 654 |
| Senescence | SAN1C | 100811875 | Protein | Increase/Decrease | SEQ ID NO: 434 | |
| Yield | LOC100777102 | 100777102 | Protein | increase | SEQ ID NO: 435 | SEQ ID NO: 656 |

### Embodiments

[0395] Various embodiments of the plants, genomes, methods, biological samples, and other compositions described herein are set forth in the following list of numbered embodiments.
[0396] 1. A modified soybean plant comprising at least one targeted modification in an endogenous GmDR1 gene resulting in increased expression of the endogenous GmDR1 gene relative to a reference plant lacking the modification, wherein the targeted modification in the GmDR1 gene comprises an insertion, replacement, and/or deletion of one or more nucleotides in the GmDR1 gene, and wherein the increase of expression in the GmDR1 gene results in an improvement in resistance to a pest or pathogen in the modified soybean plant relative to the reference plant lacking the modification.
[0397] 2. The modified soybean plant of embodiment 1, wherein the endogenous GmDR1 gene comprises the DNA molecule set forth in SEQ ID NO: 762 or an allelic variant thereof.
[0398] 3. The modified soybean plant of embodiment 1, wherein the pest is a soybean aphid, a spider mite, or a soybean cyst nematode.
[0399] 4. The modified soybean plant of embodiment 1 or 2, wherein the pathogen is Fusarium virguliforme, Pseudomonas syringae, Pseudomonas sojae, or soybean mosaic virus.
[0400] 5. The modified soybean plant of any one of embodiments 1-4, wherein the target modification is located within a GmDR1 promoter or 5′ untranslated region (5′ UTR) set forth in SEQ ID NO: 764 or in an allelic variant of the promoter or 5′ UTR.
[0401] 6. The modified soybean plant of embodiment 5, wherein the target modification(s) are located within a GmDR1 promoter of SEQ ID NO: 764 or in an allelic variant thereof at a position corresponding to: (a) nucleotides 1-40 of SEQ ID NO: 764; (b) nucleotides 20-60 of SEQ ID NO: 764; (c) nucleotides 41-80 of SEQ ID NO: 764; (d) nucleotides 61-100 of SEQ ID NO:764; (e) nucleotides 81-120 of SEQ ID NO: 764; (f) nucleotides 101-140 of SEQ ID NO: 764; (g) nucleotides 121-160 of SEQ ID NO: 764; (h) nucleotides 141-180 of SEQ ID NO: 764; (i) nucleotides 161-200 of SEQ ID NO:764; (j) nucleotides 181-220 of SEQ ID NO: 764; (k) nucleotides 201-240 of SEQ ID NO: 764; (l) nucleotides 221-260 of SEQ ID NO:764; (m) nucleotides 241-280 of SEQ ID NO: 764; (n) nucleotides 261-300 of SEQ ID NO: 764; (o) nucleotides 281-320 of SEQ ID NO: 764; (p) nucleotides 301-340 of SEQ ID NO: 764; (q) nucleotides 321-360 of SEQ ID NO:764; (r) nucleotides 341-380 of SEQ ID NO: 764; (s) nucleotides 361-400 of SEQ ID NO:764; (t) nucleotides 381-420 of SEQ ID NO: 764; (u) nucleotides 401-440 of SEQ ID NO: 764; (v) nucleotides 421-460 of SEQ ID NO:764; (w) nucleotides 441-480 of SEQ ID NO: 764; (x) nucleotides 461-500 of SEQ ID NO: 764; and/or (y) nucleotides 481-516 of SEQ ID NO: 764.
[0402] 7. The modified soybean plant of embodiment 5, wherein the target modification(s) are located within a GmDR1 5′ UTR of SEQ ID NO: 764 or in an allelic variant thereof at a position corresponding to: (a) nucleotides 520-540 of SEQ ID NO: 764; (b) nucleotides 530-550 of SEQ ID NO: 764; (c) nucleotides 541-560 of SEQ ID NO: 764; (d) nucleotides 551-570 of SEQ ID NO:764, and/or (e) nucleotides 561-583 of SEQ ID NO: 764; (f) nucleotides 101-140 of SEQ ID NO: 764; and/or (g) nucleotides 121-160 of SEQ ID NO: 764.
[0403] 8. The modified soybean plant of any one of embodiments 1 to 7, wherein the targeted modification results in introduction of a regulatory sequence set forth in Table 9 in the GmDR1 gene which provides for increased expression of the GmDR1 gene in comparison to a GmDR1 lacking the regulatory sequence and/or wherein the soybean plant further comprises a targeted modification in at least one gene selected from Table 10 or in a regulatory sequence affecting the expression of the gene from Table 10, optionally wherein the gene is associated with a trait, and wherein the trait is selected from the group consisting of abiotic stress, architecture, biotic stress, nutrient use efficiency, photosynthesis, resource partitioning, and senescence, and wherein the modification improves the trait in a cell comprising the modification relative to a cell lacking the modification, or in a plant grown from a cell comprising the modification relative to a plant lacking the modification, and/or optionally wherein the targeted modification results in increased expression of the gene of Table 10; decreased expression of the gene of Table 10; a change in the coding sequence of the modified gene of Table 10; a change in expression or activity of the modified gene of Table 10; or a change in expression, stability or activity of a protein or mRNA encoded by the modified gene of Table 10.
[0404] 9. The modified soybean plant of embodiment 8, wherein the regulatory sequence comprises at least one enhancer element of SEQ ID NO:183, SEQ ID NO: 184, or functional equivalent thereof.
[0405] 10. The modified soybean plant of embodiment 9, wherein the targeted modification in an endogenous GmDR1 gene comprises the modified GmDR1 gene of SEQ ID NO: 770 or an allelic variant thereof, optionally wherein the allelic variant has at least 95%, 98%, or 99% sequence identity to SEQ ID NO: 770; or wherein at least one enhancer element of SEQ ID NO: 184 is introduced at: (i) residues 130 to 157, 300 to 306, and/or 520 to 525 of SEQ ID NO:764 or in a corresponding position in an allelic variant thereof; (ii) between residues 441 to 450 of SEQ ID NO: 764 or in a corresponding position in an allelic variant thereof, wherein one or more of residues 441 to 450 are optionally deleted and/or optionally wherein the allelic variant has at least 95%, 98%, or 99% sequence identity to SEQ ID NO: 770; (iii) between residues 445 and 446 of SEQ ID NO: 764 or in a corresponding position in an allelic variant thereof, optionally wherein the allelic variant has at least 95%, 98%, or 99% sequence identity to SEQ ID NO: 770; or (iv) with a CRISPR-Cas nuclease and a guide RNA targeted to any one of SEQ ID NOs: 771-781.
[0406] 11. A modified soybean plant cell containing a chromosome comprising the targeted modification(s) in the endogenous GmDR1 gene set forth in any one of embodiments 1 to 10.
[0407] 12. A tissue culture of regenerable cells comprising the modified soybean plant cell of embodiment 11.
[0408] 13. A modified soybean plant part containing a chromosome comprising the targeted modification(s) in the endogenous GmDR1 gene set forth in any one of embodiments 1 to 10.
[0409] 14. The modified soybean plant part of embodiment 13, wherein the plant part is a leaf, stem, root, pod, or seed, optionally wherein said seed is coated with an insecticide, a fungicide, and/or a nematocide.
[0410] 15. Soybean seed meal comprising a DNA molecule containing the targeted modification(s) in the endogenous GmDR1 gene set forth in any one of embodiments 1 to 10, optionally wherein the seed meal is non-regenerable.
[0411] 16. The soybean seed meal of embodiment 15, wherein mycotoxin content of the meal is reduced in comparison to meal obtained from a reference plant lacking the modification and optionally wherein the mycotoxin is an aflatoxin, a fumonisin, an ochratoxin, a trichothecene, citrinin, zearalenone, or an Alternaria toxin.
[0412] 17. A DNA molecule comprising the modified endogenous soybean GmDR1 gene containing the targeted modification(s) in the endogenous GmDR1 gene set forth in any one of embodiments 1 to 10 and at least 100 base pairs of adjoining endogenous soybean chromosomal DNA located centromere-proximal and telomere-proximal to the modified endogenous soybean GmDR1 gene.
[0413] 18. A biological sample comprising the DNA molecule of embodiment 17.
[0414] 19. A method of soybean seed production, said method comprising crossing the modified soybean plant of any one of embodiments 1 to 10 with a second soybean plant to produce soybean seed and optionally harvesting the seed.
[0415] 20. A method of soybean seed production, said method comprising allowing to self or selfing the modified soybean plant of any one of embodiments 1 to 10 to produce plant seed and optionally harvesting the seed.
[0416] 21. A method of producing a plant comprising an added desired trait, said method comprising introducing a transgene conferring the desired trait into the modified soybean plant of any one of embodiments 1 to 10.
[0417] 22. A method of producing a commodity soybean plant product, said method comprising processing a modified soybean seed obtained from the modified soybean plant of any one of embodiments 1 to 10 and recovering the commodity plant product from the processed plant or seed.
[0418] 23. The method of embodiment 22, commodity plant product is seed meal, starch, silage, oil, or protein.
[0419] 24. The method of embodiment 22 or 23, wherein the commodity plant product comprises a detectable amount of a DNA molecule comprising the modified endogenous soybean GmDR1 gene containing the targeted modification(s) in the endogenous GmDR1 gene and at least 100 base pairs of adjoining endogenous soybean chromosomal DNA located centromere-proximal and telomere-proximal to the modified endogenous soybean GmDR1 gene.
[0420] 25. The method of any one of embodiments 22, 23, or 24, wherein the mycotoxin content of the commodity product is reduced in comparison to a commodity product obtained from a reference plant lacking the modification and optionally wherein the mycotoxin is an aflatoxin, a fumonisin, an ochratoxin, a trichothecene, citrinin, zearalenone, or an Alternaria toxin.
[0421] 26. A method of producing soybean plant material, the method comprising growing the soybean plant of any one of embodiments 1 to 10.
[0422] 27. The method of embodiment 26, wherein growing comprises at least one of sowing a soybean seed which germinates and forms the soybean plant, irrigating the soybean seed or plant, and/or treating the soybean plant or the soybean seed with a biological agent, herbicide, insecticide, or fungicide.
[0423] 28. A method of producing soybean plant material, the method comprising:
[0424] (a) providing the modified soybean plant of any one of embodiments 1 to 10; and,
[0425] (b) growing the modified soybean plant under conditions that allow for expression of the endogenous soybean GmDR1 gene at levels that exceed expression levels of the endogenous soybean GmDR1 gene in a reference soybean plant which lacks the modifications.
[0426] 29. The method of embodiment 28, wherein the plant material comprises a seed, optionally wherein the method further comprises harvesting the seed from the plant.
[0427] 30. A method of producing a treated soybean plant seed comprising contacting a soybean seed containing a chromosome comprising the targeted modification(s) in the endogenous GmDR1 gene set forth in any one of embodiments 1 to 10 with a composition comprising a biological agent, insecticide, or fungicide.
[0428] 31. A method of identifying a biological sample comprising a DNA molecule containing the targeted modification(s) in the endogenous GmDR1 gene set forth in any one of embodiments 1 to 10, comprising the step of detecting the presence of the DNA molecule in the biological sample.
[0429] 32. A method of increasing the expression of an endogenous GmDR1 gene in a soybean plant, the method comprising introducing the targeted modification(s) in the endogenous GmDR1 gene set forth in any one of embodiments 1 to 10.
[0430] 33. Use of the modified soybean plant of any one of embodiments 1 to 10, seed obtained therefrom, or a seed of embodiment 14 to: (a) grow a soybean plant with improved pest and/or plant pathogen resistance in comparison to a soybean plant lacking the modification; (b) harvest a lot of soybean plant seed comprising the targeted modifications; (c) produce a commodity product; or (d) breed soybean plants with improved pest and/or plant pathogen resistance in comparison to a soybean plant lacking the modification.

[0431] All cited patents and patent publications referred to in this application are incorporated herein by reference in their entirety. All of the materials and methods disclosed and claimed herein can be made and used without undue experimentation as instructed by the above disclosure and illustrated by the examples. Although the materials and methods of this disclosure have been described in terms of embodiments and illustrative examples, it will be apparent to those of skill in the art that substitutions and variations can be applied to the materials and methods described herein without departing from the concept, spirit, and scope of the disclosure. For instance, while the particular examples provided illustrate the methods and embodiments described herein using a specific plant, the principles in these examples are applicable to any plant of interest; similarly, while the particular examples provided illustrate the methods and embodiments described herein using a particular sequence-specific nuclease such as Cas9, one of skill in the art would recognize that alternative sequence-specific nucleases (e. g., CRISPR nucleases other than Cas9, such as CasX, CasY, Cas12j, and Cpf1, zinc-finger nucleases, transcription activator-like effector nucleases, Argonaute proteins, and meganucleases) are useful in various embodiments. All such similar substitutes and modifications apparent to those skilled in the art are deemed to be within the spirit, scope, and concept of the disclosure as encompassed by the embodiments of the disclosures recited herein and the specification and appended claims.

The application's sequence listing, which the Patent Office published only in electronic form, follows.

SEQUENCE LISTING (781 sequences)

SEQ ID NO: 1 - DNA, 11 bp, Artificial Sequence
  Description of Artificial Sequence: Synthetic construct
cctcgtgtctc

SEQ ID NO: 2 - DNA, 11 bp, Artificial Sequence
  Description of Artificial Sequence: Synthetic construct
ccttttgtctc

SEQ ID NO: 3 - DNA, 11 bp, Artificial Sequence
  Description of Artificial Sequence: Synthetic construct
  modified_base (10)..(10): a, c, t or g
ccttttgtcnc

SEQ ID NO: 4 - DNA, 6 bp, Artificial Sequence
  Description of Artificial Sequence: Synthetic construct
tgtctc

SEQ ID NO: 5 - protein, 5 aa, Artificial Sequence
  Description of Artificial Sequence: Synthetic construct
  MOD_RES (2)..(2): Any naturally occurring amino acid
  MOD_RES (4)..(4): Any naturally occurring amino acid
LXLXL

SEQ ID NO: 6 - protein, 6 aa, Artificial Sequence
  Description of Artificial Sequence: Synthetic construct
  MOD_RES (4)..(5): Any naturally occurring amino acid
DLNXXP

SEQ ID NO: 7 - DNA, 34 bp, Artificial Sequence
  Description of Artificial Sequence: Synthetic construct
ataacttcgtatagcatacattatacgaagttat

SEQ ID NO: 8 - DNA, 34 bp, Artificial Sequence
  Description of Artificial Sequence: Synthetic construct
ataacttcgtataatgtatgctatacgaagttat

SEQ ID NO: 9 - DNA, 34 bp, Artificial Sequence
  Description of Artificial Sequence: Synthetic construct
  modified_base (14)..(16): a, c, t or g
  modified_base (19)..(21): a, c, t or g
ataacttcgtatannntannntatacgaagttat

SEQ ID NO: 10 - DNA, 34 bp, Artificial Sequence
  Description of Artificial Sequence: Synthetic construct
ataacttcgtataatgtatactatacgaagttat

SEQ ID NO: 11 - DNA, 34 bp, Artificial Sequence
  Description of Artificial Sequence: Synthetic construct
ataacttcgtataatgtgtactatacgaagttat

SEQ ID NO: 12 - DNA, 34 bp, Artificial Sequence
  Description of Artificial Sequence: Synthetic construct
ataacttcgtataaagtatcctatacgaagttat

SEQ ID NO: 13 - DNA, 34 bp, Artificial Sequence
  Description of Artificial Sequence: Synthetic construct
ataacttcgtataagaaaccatatacgaagttat

SEQ ID NO: 14 - DNA, 34 bp, Artificial Sequence
  Description of Artificial Sequence: Synthetic construct
ataacttcgtatataataccatatacgaagttat

SEQ ID NO: 15 - DNA, 34 bp, Artificial Sequence
  Description of Artificial Sequence: Synthetic construct
ataacttcgtataagatagaatatacgaagttat

SEQ ID NO: 16 - DNA, 34 bp, Artificial Sequence; identical to SEQ ID NO: 15
  Description of Artificial Sequence: Synthetic construct

SEQ ID NO: 17 - DNA, 34 bp, Artificial Sequence
  Description of Artificial Sequence: Synthetic construct
  modified_base (14)..(16): a, c, t or g
  modified_base (19)..(21): a, c, t or g
taccgttcgtatannntannntatacgaagttat

SEQ ID NO: 18 - DNA, 34 bp, Artificial Sequence
  Description of Artificial Sequence: Synthetic construct
  modified_base (14)..(16): a, c, t or g
  modified_base (19)..(21): a, c, t or g
ataacttcgtatannntannntatacgaacggta

SEQ ID NO: 19 - DNA, 8 bp, Artificial Sequence
  Description of Artificial Sequence: Synthetic construct
cacgtggc

SEQ ID NO: 20 - DNA, 8 bp, Artificial Sequence
  Description of Artificial Sequence: Synthetic construct
yacgtggc

SEQ ID NO: 21 - DNA, 8 bp, Artificial Sequence
  Description of Artificial Sequence: Synthetic construct
bacgtgkm

SEQ ID NO: 22 - DNA, 10 bp, Artificial Sequence
  Description of Artificial Sequence: Synthetic construct
gacacgtaga

SEQ ID NO: 23 - DNA, 14 bp, Artificial Sequence
  Description of Artificial Sequence: Synthetic construct
ttdccwwwwwwggh

SEQ ID NO: 24 - DNA, 11 bp, Artificial Sequence
  Description of Artificial Sequence: Synthetic construct
ccatttttagt

SEQ ID NO: 25 - DNA, 10 bp, Artificial Sequence
  Description of Artificial Sequence: Synthetic construct
ccatttttgg

SEQ ID NO: 26 - DNA, 18 bp, Artificial Sequence
  Description of Artificial Sequence: Synthetic construct
  modified_base (1)..(1): a, c, t or g
  modified_base (11)..(12): a, c, t or g
  modified_base (18)..(18): a, c, t or g
nttdccwwwwnnggwaan

SEQ ID NO: 27 - DNA, 18 bp, Artificial Sequence
  Description of Artificial Sequence: Synthetic construct
  modified_base (1)..(2): a, c, t or g
  modified_base (4)..(4): a, c, t or g
  modified_base (18)..(18): a, c, t or g
nnwnccawwwwtrgwwan

SEQ ID NO: 28 - DNA, 16 bp, Artificial Sequence
  Description of Artificial Sequence: Synthetic construct
ttwcyawwwwtrgwaa

SEQ ID NO: 29 - DNA, 10 bp, Artificial Sequence
  Description of Artificial Sequence: Synthetic construct
ccatttttag

SEQ ID NO: 30 - DNA, 10 bp, Artificial Sequence
  Description of Artificial Sequence: Synthetic construct
ccatttttgg

SEQ ID NO: 31 - DNA, 6 bp, Artificial Sequence
  Description of Artificial Sequence: Synthetic construct
tgtctc

SEQ ID NO: 32 - DNA, 6 bp, Artificial Sequence
  Description of Artificial Sequence: Synthetic construct
tgtctc

SEQ ID NO: 33 - DNA, 9 bp, Artificial Sequence
  Description of Artificial Sequence: Synthetic construct
caatwattg

SEQ ID NO: 34 - DNA, 9 bp, Artificial Sequence
  Description of Artificial Sequence: Synthetic construct
caatsattg

SEQ ID NO: 35 - DNA, 9 bp, Artificial Sequence
  Description of Artificial Sequence: Synthetic construct
  modified_base (5)..(5): a, c, t or g
caatnattg

SEQ ID NO: 36 - DNA, 9 bp, Artificial Sequence
  Description of Artificial Sequence: Synthetic construct
caattatta

SEQ ID NO: 37 - DNA, 7 bp, Artificial Sequence
  Description of Artificial Sequence: Synthetic construct
ctaacca

SEQ ID NO: 38 - DNA, 6 bp, Artificial Sequence
  Description of Artificial Sequence: Synthetic construct
cacatg

SEQ ID NO: 39 - DNA, 6 bp, Artificial Sequence
  Description of Artificial Sequence: Synthetic construct
ggttaa

SEQ ID NO: 40 - DNA, 10 bp, Artificial Sequence
  Description of Artificial Sequence: Synthetic construct
ccwwwwwwgg

SEQ ID NO: 41 - DNA, 18 bp, Artificial Sequence
  Description of Artificial Sequence: Synthetic construct
gtttacataaatggaaaa

SEQ ID NO: 42 - DNA, 18 bp, Artificial Sequence
  Description of Artificial Sequence: Synthetic construct
cttacctttcatggatta

SEQ ID NO: 43 - DNA, 18 bp, Artificial Sequence
  Description of Artificial Sequence: Synthetic construct
ctttccatttttagtaac

SEQ ID NO: 44 - DNA, 8 bp, Artificial Sequence
  Description of Artificial Sequence: Synthetic construct
tggccgac

SEQ ID NO: 45 - DNA, 8 bp, Artificial Sequence
  Description of Artificial Sequence: Synthetic construct
ccacgtgg

SEQ ID NO: 46 - DNA, 8 bp, Artificial Sequence
  Description of Artificial Sequence: Synthetic construct
aamaatct

SEQ ID NO: 47 - DNA, 10 bp, Artificial Sequence
  Description of Artificial Sequence: Synthetic construct
aaacaatcta

SEQ ID NO: 48 - DNA, 15 bp, Artificial Sequence
  Description of Artificial Sequence: Synthetic construct
aaaaaaaatctatga

SEQ ID NO: 49 - DNA, 7 bp, Artificial Sequence
  Description of Artificial Sequence: Synthetic construct
  modified_base (5)..(6): a, c, t or g
acacnng

SEQ ID NO: 50 - DNA, 9 bp, Artificial Sequence
  Description of Artificial Sequence: Synthetic construct
taccgacat

SEQ ID NO: 51 - DNA, 9 bp, Artificial Sequence
  Description of Artificial Sequence: Synthetic construct
taccgacat

SEQ ID NO: 52 - DNA, 9 bp, Artificial Sequence
  Description of Artificial Sequence: Synthetic construct
  modified_base (8)..(8): a, c, t or g
drccgacnw

SEQ ID NO: 53 - DNA, 8 bp, Artificial Sequence
  Description of Artificial Sequence: Synthetic construct
tttcccgc

SEQ ID NO: 54 - DNA, 8 bp, Artificial Sequence
  Description of Artificial Sequence: Synthetic construct
tttcccgc

SEQ ID NO: 55 - DNA, 9 bp, Artificial Sequence
  Description of Artificial Sequence: Synthetic construct
tctcccgcc

SEQ ID NO: 56 - DNA, 23 bp, Artificial Sequence
  Description of Artificial Sequence: Synthetic construct
ttcaagggggcatgtatcttgaa

SEQ ID NO: 57 - DNA, 23 bp, Artificial Sequence
  Description of Artificial Sequence: Synthetic construct
ttcaagggggcatgtatcttgaa

SEQ ID NO: 58 - DNA, 23 bp, Artificial Sequence
  Description of Artificial Sequence: Synthetic construct
ttcaagggggcatgtatcttgaa

SEQ ID NO: 59 - DNA, 29 bp, Artificial Sequence
  Description of Artificial Sequence: Synthetic construct
ggattcaagggggcatgtatcttgaatcc

SEQ ID NO: 60 - DNA, 11 bp, Artificial Sequence
  Description of Artificial Sequence: Synthetic construct
taagagccgcc

SEQ ID NO: 61 - DNA, 6 bp, Artificial Sequence
  Description of Artificial Sequence: Synthetic construct
gccgcc

SEQ ID NO: 62 - DNA, 9 bp, Artificial Sequence
  Description of Artificial Sequence: Synthetic construct
aaaatatct

SEQ ID NO: 63 - DNA, 6 bp, Artificial Sequence
  Description of Artificial Sequence: Synthetic construct
wgatar

SEQ ID NO: 64 - DNA, 8 bp, Artificial Sequence
  Description of Artificial Sequence: Synthetic construct
ccacgtgg

SEQ ID NO: 65 - DNA, 6 bp, Artificial Sequence
  Description of Artificial Sequence: Synthetic construct
cacgtg

SEQ ID NO: 66 - DNA, 6 bp, Artificial Sequence
  Description of Artificial Sequence: Synthetic construct
gccgcc

SEQ ID NO: 67 - DNA, 15 bp, Artificial Sequence
  Description of Artificial Sequence: Synthetic construct
tgtgtggttaatatg

SEQ ID NO: 68 - DNA, 6 bp, Artificial Sequence
  Description of Artificial Sequence: Synthetic construct
ccgtcg

SEQ ID NO: 69 - DNA, 10 bp, Artificial Sequence
  Description of Artificial Sequence: Synthetic construct
  modified_base (5)..(6): a, c, t or g
agaannttct

SEQ ID NO: 70 - DNA, 6 bp, Artificial Sequence
  Description of Artificial Sequence: Synthetic construct
gataag

SEQ ID NO: 71 - DNA, 10 bp, Artificial Sequence
  Description of Artificial Sequence: Synthetic construct
cgtcaatgaa

SEQ ID NO: 72 - DNA, 13 bp, Artificial Sequence
  Description of Artificial Sequence: Synthetic construct
catacgtcgtcaa

SEQ ID NO: 73 - DNA, 8 bp, Artificial Sequence
  Description of Artificial Sequence: Synthetic construct
taaatgya

SEQ ID NO: 74 - DNA, 10 bp, Artificial Sequence
  Description of Artificial Sequence: Synthetic construct
acgtcataga

SEQ ID NO: 75 - DNA, 10 bp, Artificial Sequence
  Description of Artificial Sequence: Synthetic construct
tctacgtcac

SEQ ID NO: 76 - DNA, 7 bp, Artificial Sequence
  Description of Artificial Sequence: Synthetic construct
accgaca

SEQ ID NO: 77 - DNA, 12 bp, Artificial Sequence
  Description of Artificial Sequence: Synthetic construct
tctaacctacca

SEQ ID NO: 78 - DNA, 8 bp, Artificial Sequence
  Description of Artificial Sequence: Synthetic construct
maccwamc

SEQ ID NO: 79 - DNA, 8 bp, Artificial Sequence
  Description of Artificial Sequence: Synthetic construct
mtccwacc

SEQ ID NO: 80 - DNA, 9 bp, Artificial Sequence
  Description of Artificial Sequence: Synthetic construct
taactsgtt

SEQ ID NO: 81 - DNA, 8 bp, Artificial Sequence
  Description of Artificial Sequence: Synthetic construct
taactaac

SEQ ID NO: 82 - DNA, 7 bp, Artificial Sequence
  Description of Artificial Sequence: Synthetic construct
amcwamc

SEQ ID NO: 83 - DNA, 9 bp, Artificial Sequence
  Description of Artificial Sequence: Synthetic construct
agatcgacg

SEQ ID NO: 84 - DNA, 26 bp, Artificial Sequence
  Description of Artificial Sequence: Synthetic construct
atcttatgtcattgatgacgacctcc

SEQ ID NO: 85 - DNA, 11 bp, Artificial Sequence
  Description of Artificial Sequence: Synthetic construct
tacacttttgg

SEQ ID NO: 86 - DNA, 20 bp, Artificial Sequence
  Description of Artificial Sequence: Synthetic construct
tgacgyaagsrmtkacgymm

SEQ ID NO: 87 - DNA, 8 bp, Artificial Sequence
  Description of Artificial Sequence: Synthetic construct
cgcggatc

SEQ ID NO: 88 - DNA, 8 bp, Artificial Sequence
  Description of Artificial Sequence: Synthetic construct
gtgatcac

SEQ ID NO: 89 - DNA, 20 bp, Artificial Sequence
  Description of Artificial Sequence: Synthetic construct
ttggttttgatcaaaaccaa

SEQ ID NO: 90 - DNA, 15 bp, Artificial Sequence
  Description of Artificial Sequence: Synthetic construct
taattgactcaatta

SEQ ID NO: 91 - DNA, 5 bp, Artificial Sequence
  Description of Artificial Sequence: Synthetic construct
caaca

SEQ ID NO: 92 - DNA, 6 bp, Artificial Sequence
  Description of Artificial Sequence: Synthetic construct
cacctg

SEQ ID NO: 93 - DNA, 8 bp, Artificial Sequence
  Description of Artificial Sequence: Synthetic construct
catgcatg

SEQ ID NO: 94 - DNA, 9 bp, Artificial Sequence
  Description of Artificial Sequence: Synthetic construct
  modified_base (2)..(2): a, c, t or g
tncgtacaa

SEQ ID NO: 95 - DNA, 6 bp, Artificial Sequence
  Description of Artificial Sequence: Synthetic construct
actttg

SEQ ID NO: 96 - DNA, 16 bp, Artificial Sequence
  Description of Artificial Sequence: Synthetic construct
aggggcataatggtaa

SEQ ID NO: 97 - DNA, 9 bp, Artificial Sequence
  Description of Artificial Sequence: Synthetic construct
aaaccctaa

SEQ ID NO: 98 - DNA, 8 bp, Artificial Sequence
  Description of Artificial Sequence: Synthetic construct
tgacgtgg

SEQ ID NO: 99 - DNA, 5 bp, Artificial Sequence
  Description of Artificial Sequence: Synthetic construct
ttgac

SEQ ID NO: 100 - DNA, 8 bp, Artificial Sequence
  Description of Artificial Sequence: Synthetic construct
atacgtgt

SEQ ID NO: 101 - DNA, 16 bp, Artificial Sequence
  Description of Artificial Sequence: Synthetic construct
aaaacagaataggaaa

SEQ ID NO: 102 - DNA, 8 bp, Artificial Sequence
  Description of Artificial Sequence: Synthetic construct
aaattaaa

SEQ ID NO: 103 - DNA, 8 bp, Artificial Sequence
  Description of Artificial Sequence: Synthetic construct
aaattagt

SEQ ID NO: 104 - DNA, 8 bp, Artificial Sequence
  Description of Artificial Sequence: Synthetic construct
actaattt

SEQ ID NO: 105 - DNA, 12 bp, Artificial Sequence
  Description of Artificial Sequence: Synthetic construct
ccaatttaatgg

SEQ ID NO: 106 - DNA, 6 bp, Artificial Sequence
  Description of Artificial Sequence: Synthetic construct
actcat

SEQ ID NO: 107 - DNA, 19 bp, Artificial Sequence
  Description of Artificial Sequence: Synthetic construct
cttaaaccctaggggtaat

SEQ ID NO: 108 - DNA, 10 bp, Artificial Sequence
  Description of Artificial Sequence: Synthetic construct
ttwtactagt

SEQ ID NO: 109 - DNA, 9 bp, Artificial Sequence
  Description of Artificial Sequence: Synthetic construct
ataaaacgt

SEQ ID NO: 110 - DNA, 9 bp, Artificial Sequence
  Description of Artificial Sequence: Synthetic construct
tgtatatat

SEQ ID NO: 111 - DNA, 9 bp, Artificial Sequence
  Description of Artificial Sequence: Synthetic construct
ctcctaatt

SEQ ID NO: 112 - DNA, 10 bp, Artificial Sequence
  Description of Artificial Sequence: Synthetic construct
ttgcatgact

SEQ ID NO: 113 - DNA, 6 bp, Artificial Sequence
  Description of Artificial Sequence: Synthetic construct
agccac

SEQ ID NO: 114 - DNA, 5 bp, Artificial Sequence
  Description of Artificial Sequence: Synthetic construct
gggcc

SEQ ID NO: 115 - DNA, 9 bp, Artificial Sequence
  Description of Artificial Sequence: Synthetic construct
ctcaagtga

SEQ ID NO: 116 - DNA, 9 bp, Artificial Sequence
  Description of Artificial Sequence: Synthetic construct
gtatgatgg

SEQ ID NO: 117 - DNA, 7 bp, Artificial Sequence
  Description of Artificial Sequence: Synthetic construct
gagtgag

SEQ ID NO: 118 - DNA, 8 bp, Artificial Sequence
  Description of Artificial Sequence: Synthetic construct
cacgtggc

SEQ ID NO: 119 - DNA, 34 bp, Artificial Sequence
  Description of Artificial Sequence: Synthetic construct
gtttaattgagttgtcatatgttaataacggtat

SEQ ID NO: 120 - DNA, 34 bp, Artificial Sequence
  Description of Artificial Sequence: Synthetic construct
ataccgttattaacatatgacaactcaattaaac

SEQ ID NO: 121 - DNA, 34 bp, Artificial Sequence
  Description of Artificial Sequence: Synthetic construct
ccgacaaaaggccgacaaaaggccgacaaaaggt

SEQ ID NO: 122 - DNA, 34 bp, Artificial Sequence
  Description of Artificial Sequence: Synthetic construct
accttttgtcggccttttgtcggccttttgtcgg

SEQ ID NO: 123 - DNA, 68 bp, Artificial Sequence
  Description of Artificial Sequence: Synthetic construct
gccgacaaaaggccgacaaaaggccgacaaaaggccgacaaaaggccgacaaaaggccgacaaaaggt

SEQ ID NO: 124 - DNA, 68 bp, Artificial Sequence
  Description of Artificial Sequence: Synthetic construct
accttttgtcggccttttgtcggccttttgtcggccttttgtcggccttttgtcggccttttgtcggc

SEQ ID NO: 125 - DNA, 100 bp, Artificial Sequence
  Description of Artificial Sequence: Synthetic construct
ccgacaaaaggccgacaaaaggccgacaaaaggccgacaaaaggccgacaaaaggccgacaaaaggccgacaaaaggccgacaaaaggccgacaaaaggt

SEQ ID NO: 126 - DNA, 100 bp, Artificial Sequence
  Description of Artificial Sequence: Synthetic construct
accttttgtcggccttttgtcggccttttgtcggccttttgtcggccttttgtcggccttttgtcggccttttgtcggccttttgtcggccttttgtcgg

SEQ ID NO: 127 - DNA, 34 bp, Artificial Sequence; identical to SEQ ID NO: 7
  Description of Artificial Sequence: Synthetic construct

SEQ ID NO: 128 - DNA, 34 bp, Artificial Sequence; identical to SEQ ID NO: 8
  Description of Artificial Sequence: Synthetic construct

SEQ ID NO: 129 - DNA, 34 bp, Artificial Sequence; identical to SEQ ID NO: 9
  Description of Artificial Sequence: Synthetic construct
  modified_base (14)..(16): a, c, t or g
  modified_base (19)..(21): a, c, t or g

SEQ ID NO: 130 - DNA, 34 bp, Artificial Sequence; identical to SEQ ID NO: 10
  Description of Artificial Sequence: Synthetic construct

SEQ ID NO: 131 - DNA, 34 bp, Artificial Sequence; identical to SEQ ID NO: 11
  Description of Artificial Sequence: Synthetic construct

SEQ ID NO: 132 - DNA, 34 bp, Artificial Sequence; identical to SEQ ID NO: 12
  Description of Artificial Sequence: Synthetic construct

SEQ ID NO: 133 - DNA, 34 bp, Artificial Sequence; identical to SEQ ID NO: 13
  Description of Artificial Sequence: Synthetic construct

SEQ ID NO: 134 - DNA, 34 bp, Artificial Sequence; identical to SEQ ID NO: 14
  Description of Artificial Sequence: Synthetic construct

SEQ ID NO: 135 - DNA, 34 bp, Artificial Sequence; identical to SEQ ID NO: 15
  Description of Artificial Sequence: Synthetic construct

SEQ ID NO: 136 - DNA, 34 bp, Artificial Sequence; identical to SEQ ID NO: 15
  Description of Artificial Sequence: Synthetic construct

SEQ ID NO: 137 - DNA, 34 bp, Artificial Sequence; identical to SEQ ID NO: 17
  Description of Artificial Sequence: Synthetic construct
  modified_base (14)..(16): a, c, t or g
  modified_base (19)..(21): a, c, t or g

SEQ ID NO: 138 - DNA, 34 bp, Artificial Sequence; identical to SEQ ID NO: 18
  Description of Artificial Sequence: Synthetic construct
  modified_base (14)..(16): a, c, t or g
  modified_base (19)..(21): a, c, t or g

SEQ ID NO: 139 - DNA, 20 bp, Artificial Sequence
  Description of Artificial Sequence: Synthetic construct
gtgctctctctcttctgtca

SEQ ID NO: 140 - DNA, 20 bp, Artificial Sequence
  Description of Artificial Sequence: Synthetic construct
ctgctctctctcttctgtca

SEQ ID NO: 141 - DNA, 20 bp, Artificial Sequence
  Description of Artificial Sequence: Synthetic construct
ttgcttactctcttctgtca

SEQ ID NO: 142 - DNA, 20 bp, Artificial Sequence
  Description of Artificial Sequence: Synthetic construct
ccgctctctctcttctgtca

SEQ ID NO: 143 - DNA, 21 bp, Artificial Sequence
  Description of Artificial Sequence: Synthetic construct
tggagctcccttcattccaat

SEQ ID NO: 144 - DNA, 21 bp, Artificial Sequence
  Description of Artificial Sequence: Synthetic construct
tcgagttcccttcattccaat

SEQ ID NO: 145 - DNA, 21 bp, Artificial Sequence
  Description of Artificial Sequence: Synthetic construct
atgagctctcttcaaaccaaa

SEQ ID NO: 146 - DNA, 21 bp, Artificial Sequence
  Description of Artificial Sequence: Synthetic construct
tggagctcccttcattccaag

SEQ ID NO: 147 - DNA, 21 bp, Artificial Sequence
  Description of Artificial Sequence: Synthetic construct
tagagcttccttcaaaccaaa

SEQ ID NO: 148 - DNA, 21 bp, Artificial Sequence
  Description of Artificial Sequence: Synthetic construct
tggagctccattcgatccaaa

SEQ ID NO: 149 - DNA, 21 bp, Artificial Sequence
  Description of Artificial Sequence: Synthetic construct
agcagctcccttcaaaccaaa

SEQ ID NO: 150 - DNA, 21 bp, Artificial Sequence
  Description of Artificial Sequence: Synthetic construct
cagagctcccttcactccaat

SEQ ID NO: 151 - DNA, 21 bp, Artificial Sequence
  Description of Artificial Sequence: Synthetic construct
tggagctcccttcactccaat

SEQ ID NO: 152 - DNA, 21 bp, Artificial Sequence
  Description of Artificial Sequence: Synthetic construct
tggagctcccttcactccaag

SEQ ID NO: 153 - DNA, 21 bp, Artificial Sequence
  Description of Artificial Sequence: Synthetic construct
tggagctccctttaatccaat

SEQ ID NO: 154 - DNA, 21 bp, Artificial Sequence
  Description of Artificial Sequence: Synthetic construct
ttgggatgaagcctggtccgg

SEQ ID NO: 155 - DNA, 21 bp, Artificial Sequence
  Description of Artificial Sequence: Synthetic construct
ctgggatgaagcctggtccgg

SEQ ID NO: 156 - DNA, 21 bp, Artificial Sequence
  Description of Artificial Sequence: Synthetic construct
ctggaatgaagcctggtccgg

SEQ ID NO: 157 - DNA, 20 bp, Artificial Sequence
  Description of Artificial Sequence: Synthetic construct
cgggatgaagcctggtccgg

SEQ ID NO: 158 - DNA, 21 bp, Artificial Sequence
  Description of Artificial Sequence: Synthetic construct
gagatcaggctggcagcttgt

SEQ ID NO: 159 - DNA, 21 bp, Artificial Sequence
  Description of Artificial Sequence: Synthetic construct
tagatcaggctggcagcttgt

SEQ ID NO: 160 - DNA, 21 bp, Artificial Sequence
  Description of Artificial Sequence: Synthetic construct
aagatcaggctggcagcttgt

SEQ ID NO: 161 - DNA, 20 bp, Artificial Sequence
  Description of Artificial Sequence: Synthetic construct
gtgctctctctcttctgtca

SEQ ID NO: 162 - DNA, 20 bp, Artificial Sequence
  Description of Artificial Sequence: Synthetic construct
ctgctctctctcttctgtca

SEQ ID NO: 163 - DNA, 20 bp, Artificial Sequence
  Description of Artificial Sequence: Synthetic construct
ttgcttactctcttctgtca

SEQ ID NO: 164 - DNA, 20 bp, Artificial Sequence
  Description of Artificial Sequence: Synthetic construct
ccgctctctctcttctgtca

SEQ ID NO: 165 - DNA, 21 bp, Artificial Sequence
  Description of Artificial Sequence: Synthetic construct
tggcatgcagggagccaggca

SEQ ID NO: 166 - DNA, 21 bp, Artificial Sequence
  Description of Artificial Sequence: Synthetic construct
aggaatacagggagccaggca

SEQ ID NO: 167 - DNA, 21 bp, Artificial Sequence
  Description of Artificial Sequence: Synthetic construct
gggtttacagggagccaggca

SEQ ID NO: 168 - DNA, 21 bp, Artificial Sequence
  Description of Artificial Sequence: Synthetic construct
aggcatacagggagccaggca

SEQ ID NO: 169 - DNA, 21 bp, Artificial Sequence
  Description of Artificial Sequence: Synthetic construct
aaacaatgcgatccctttgga

SEQ ID NO: 170 - DNA, 21 bp, Artificial Sequence
  Description of Artificial Sequence: Synthetic construct
agaccatgcgatccctttgga

SEQ ID NO: 171 - DNA, 21 bp, Artificial Sequence
  Description of Artificial Sequence: Synthetic construct
ggtcagagcgatccctttggc

SEQ ID NO: 172 - DNA, 21 bp, Artificial Sequence
  Description of Artificial Sequence: Synthetic construct
agacaatgcgatccctttgga

SEQ ID NO: 173 - DNA, 22 bp, Artificial Sequence
  Description of Artificial Sequence: Synthetic construct
tcgttcaagaaagcctgtggaa

SEQ ID NO: 174 - DNA, 21 bp, Artificial Sequence
  Description of Artificial Sequence: Synthetic construct
cgttcaagaaagcctgtggaa

SEQ ID NO: 175 - DNA, 22 bp, Artificial Sequence
  Description of Artificial Sequence: Synthetic construct
tcgttcaagaaagcatgtggaa

SEQ ID NO: 176 - DNA, 22 bp, Artificial Sequence
  Description of Artificial Sequence: Synthetic construct
acgttcaagaaagcttgtggaa

SEQ ID NO: 177 - DNA, 21 bp, Artificial Sequence
  Description of Artificial Sequence: Synthetic construct
cgttcaagaaagcctgtggaa

SEQ ID NO: 178 - DNA, 300 bp, Artificial Sequence
  Description of Artificial Sequence: Synthetic construct
ggacaacaagcaccttcttgccttgcaaggcctcccttccctatggtagccacttgagtggatgacttcaccttaaagctattgattccctaagtgccagacataataggctatacattctctctggtggcaacaatgagccattttggttggtgtggtagtctattattgagttttttttggcaccgtactcccatggagagtagaagacaaactcttcaccgttgtagtcgttgatggtattggtggtgacgacatccttggtgtgcatgcactggtgagtcactgttgtactcggcg

SEQ ID NO: 179 - DNA, 104 bp, Artificial Sequence
  Description of Artificial Sequence: Synthetic construct
ggacaacaagcaccttcttgccttgcaaggcctcccttccctatggtagccacttgagtggatgacttcaccttaaagctatcgattccctaagtgccagacat

SEQ ID NO: 180 - DNA, 80 bp, Artificial Sequence
  Description of Artificial Sequence: Synthetic construct
ctcttcaccgttgtagtcgttgatggtattggtggtgacgacatccttggtgtgcatgcactggtgagtcactgttgtac

SEQ ID NO: 181 - DNA, 184 bp, Artificial Sequence
  Description of Artificial Sequence: Synthetic construct
ggacaacaagcaccttcttgccttgcaaggcctcccttccctatggtagccacttgagtggatgacttcaccttaaagctatcgattccctaagtgccagacatctcttcaccgttgtagtcgttgatggtattggtggtgacgacatccttggtgtgcatgcactggtgagtcactgttgtac

SEQ ID NO: 182 - DNA, 184 bp, Artificial Sequence
  Description of Artificial Sequence: Synthetic construct
ctcttcaccgttgtagtcgttgatggtattggtggtgacgacatccttggtgtgcatgcactggtgagtcactgttgtacggacaacaagcaccttcttgccttgcaaggcctcccttccctatggtagccacttgagtggatgacttcaccttaaagctatcgattccctaagtgccagacat

SEQ ID NO: 183 - DNA, 16 bp, Artificial Sequence
  Description of Artificial Sequence: Synthetic construct
acgtaagcgcttacgt

SEQ ID NO: 184 - DNA, 12 bp, Artificial Sequence
  Description of Artificial Sequence: Synthetic construct
gtaagcgcttac

SEQ ID NO: 185 - DNA, 43 bp, Artificial Sequence
  Description of Artificial Sequence: Synthetic construct
aagagatgagctcttgagcaatgtaaagggtcaagttgtttct

SEQ ID NO: 186 - DNA, 43 bp, Artificial Sequence
  Description of Artificial Sequence: Synthetic construct
agaaacaacttgaccctttacattgctcaagagctcatctctt

SEQ ID NO: 187 - RNA, 34 nt, Artificial Sequence
  Description of Artificial Sequence: Synthetic construct
accuuuugucggccuuuugucggccuuuugucgg

SEQ ID NO: 188 - DNA, 38 bp, Artificial Sequence
  Description of Artificial Sequence: Synthetic construct
tcggtccgacaaaaggccgacaaaaggcggacaaaagg

SEQ ID NO: 189 - DNA, 38 bp, Artificial Sequence
  Description of Artificial Sequence: Synthetic construct
accgaccttttgtcggccttttgtcggccttttgtcgg

SEQ ID NO: 190 - DNA, 117 bp, Artificial Sequence
  Description of Artificial Sequence: Synthetic construct
atgggagtagaggcgggcggcggctgcggtgggagggcggtagtcaccggattctacgtctggggctgggagttcctcaccgccctcctgctcttctcggccaccacctcctactag

SEQ ID NO: 191 - DNA, 15 bp, Artificial Sequence
  Description of Artificial Sequence: Synthetic construct
aaaaaaaaaaaaaaa

SEQ ID NO: 192 - DNA, 25 bp, Artificial Sequence
  Description of Artificial Sequence: Synthetic construct
cacatacacacaaaaataaaaaaga

SEQ ID NO: 193 - DNA, 16 bp, Artificial Sequence
  Description of Artificial Sequence: Synthetic construct
gaatatatatatattc

SEQ ID NO: 194 - DNA, 618 bp, Artificial Sequence
  Description of Artificial Sequence: Synthetic construct
gtgaacaaccttatgaaatttgggcgcataacttcgtatagcatacattatacgaagttataaagaactcgccctcaagggttgatcttatgccatcgtcatgataaacagtggagcacggacgatcctttacgttgtttttaacaaactttgtcagaaaactagcatcattaacttcttaatgacgatttcacaacaaaaaaaggtaacctcgctactaacataacaaaatacttgttgcttattaattatatgttttttaatctttgatcaggggacaacagtggttgataacctgttgaacagtgaggatgtccactacatgctcggggccttgaggactcttggtctctctgtcgaagcggacaaagctgccaaaagagctgtagttgttggctgtggtggaaagttcccagttgaggattctaaagaggaagtgcagctcttcttggggaatgctggaattgcaatgcgggcattgacagcagctgttactgctgctggtggaaatgcaacgtatgtttcctctctttctctctacaatacttgcataacttcgtataaagtatcctatacgaagttattggagttagtatgaaacccatgggtatgtctagt

SEQ ID NO: 195 - DNA, 84 bp, Artificial Sequence
  Description of Artificial Sequence: Synthetic construct
tactccctccgtttctttttattagtcgctggatagtgcaattttgcactatccagcgactaataaaaagaaacggagggagta

SEQ ID NO: 196 - DNA, 84 bp, Artificial Sequence
  Description of Artificial Sequence: Synthetic construct
tactccctccgtttctttttattagtcgctggatagtgcaaaattgcactatccagcgactaataaaaagaaacggagggagta

SEQ ID NO: 197 - DNA, 28 bp, Artificial Sequence
  Description of Artificial Sequence: Synthetic construct
acacgtgacacgtgacacgtgacacgtg

SEQ ID NO: 198 - DNA, 36 bp, Artificial Sequence
  Description of Artificial Sequence: Synthetic construct
ttatttattttatttattttatttattttatttatt

SEQ ID NO: 199 - DNA, 36 bp, Artificial Sequence
  Description of Artificial Sequence: Synthetic construct
aattttaattttaattttaattttaattttaatttt

SEQ ID NO: 200 - DNA, 36 bp, Artificial Sequence
  Description of Artificial Sequence: Synthetic construct
tctctttctctttctctttctctttctctttctctt

SEQ ID NO: 201 - DNA, 92 bp, Artificial Sequence
  Description of Artificial Sequence: Synthetic construct
attaaaaaaataaataagatattattaaaaaaataaataagatattattaaaaaaataaataagatattattaaaaaaataaataagatatt

SEQ ID NO: 202 - DNA, 92 bp, Artificial Sequence
  Description of Artificial Sequence: Synthetic construct
agatctaggagactgacatagattggaggagacattttgtataataagatctaggagactgacatagattggaggagacattttgtataata

SEQ ID NO: 203 - DNA, 8 bp, Artificial Sequence
  Description of Artificial Sequence: Synthetic construct
ctccdccd

SEQ ID NO: 204 - DNA, 9 bp, Artificial Sequence
  Description of Artificial Sequence: Synthetic construct
hkcmrmckm

SEQ ID NO: 205 - DNA, 11 bp, Artificial Sequence
  Description of Artificial Sequence: Synthetic construct
  modified_base (8)..(9): a, c, t or g
sacgtggnnvw

SEQ ID NO: 206 - DNA, 9 bp, Artificial Sequence
  Description of Artificial Sequence: Synthetic construct
araragarr

SEQ ID NO: 207 - DNA, 9 bp, Artificial Sequence
  Description of Artificial Sequence: Synthetic construct
cahcamcah

SEQ ID NO: 208 - DNA, 9 bp, Artificial Sequence
  Description of Artificial Sequence: Synthetic construct
raacccwar

SEQ ID NO: 209 - DNA, 8 bp, Artificial Sequence
  Description of Artificial Sequence: Synthetic construct
  modified_base (2)..(2): a, c, t or g
  modified_base (7)..(7): a, c, t or g
gnatatnc

SEQ ID NO: 210 - DNA, 12 bp, Artificial Sequence
  Description of Artificial Sequence: Synthetic oligonucleotide
gtaagcgcttac

SEQ ID NO: 211 - DNA, 40 bp, Artificial Sequence
  Description of Artificial Sequence: Synthetic oligonucleotide
gccacgtgccgccacgtgccgccacgtgccgccacgtgcc

SEQ ID NO: 212 - DNA, 44 bp, Artificial Sequence
  Description of Artificial Sequence: Synthetic oligonucleotide
aaaatatttataaaatatttataaaatatttataaaatatttat

SEQ ID NO: 213 - DNA, 36 bp, Artificial Sequence
  Description of Artificial Sequence: Synthetic oligonucleotide
cccgccaaacccgccaaacccgccaaacccgccaaa

SEQ ID NO: 214 - DNA, 36 bp, Artificial Sequence; identical to SEQ ID NO: 199
  Description of Artificial Sequence: Synthetic oligonucleotide

SEQ ID NO: 215 - DNA, 16 bp, Artificial Sequence
  Description of Artificial Sequence: Synthetic oligonucleotide
gaatatatatatattc

SEQ ID NO: 216-234 - skipped (19 entries)

SEQ ID NO: 235 - DNA, 2705 bp, Glycine max
ttttcttttgttcccaatttagaattgataattttcatcttctaatttaaaaatggaaaatatttgataaacattcaatttattatccaactcttaaagaaagaataaaaaaggaaaataaaataatagatatatgatataatttatgatataataaaaaaagagaaatagagaaaaataaaataaaaatatttgtgagacatttaaaattaaaagatgaattatatatcatgattagaaagacaaaaatatcactttcaaattttaagaataaaaaagaaaaaataaacataaatttaagagataaaaataaagtatttaagtcttatttaatatattaattaaaaatacaaacgtgtataataatcttggatgagtccaaattgacgtcttttcttatagtatttctttgatctatcattttttttcttttcttttcttttttttttaaaaaaaaaagtatcactgttacccaaattccacacaatatatcgtatgactgtgtcaactacacatgacataacatattaactccctcttttgtccctcactcactgacacccacacgcacacttttctcaacactttcctctttcattttcggaatcagtcaaaacccaatcacaaggccccccaactagccaaccagctggctcctcacaaccatgagctcacaatctcactctcactctccgtgttgcctttttatatatatatatatatgcttccctcacttccctttatttattatatatatccctcactcactctatctcttttctccagcagcaccaaaaccacccaacactcgaactcaatatccattattaccaaaaaaaaagaaaaaaggatatcaaacacccttttcatcattaaaactctcagttccctctttccctatcaaaaccctttcccacaacactactcactccagtacaagaaaccctttttcaatttggtttcaacagcacacacacacacacatatatatatatatagcatgtttaccttgaatcattcttctgatttgtaccatgtttcccctgagctctcatcttccttggacacatcctcgccggcttcggagggctctcgtggcgtggcattttccgacgaggaggtgcggctggcggtgaggcacccgaagaagcgggcaggtcggaagaagttccgggagacgcgccacccggtgtaccggggggtgaggaggaggaactcggataagtgggtgtgtgaggtgagggagcccaacaagaagaccaggatttggctggggactttccccacgccggagatggcggctcgggcgcacgacgtggcggcaatggccctgaggggccggtatgcctgtctaaactttgctgactcggcctggcggttacctgttcccgccacggccgaggcaaaggatatacagaaggcagcagcagaagctgcccaggctttcagaccagatcaaaccttaaaaaatgctaatacaaggcaggagtgtgtggaggcggtggcggtggcggtggcggagacaacaacggcgacggcacaaggggtgttttatatggaggaagaagagcaggtgttggatatgcctgagttgcttaggaatatggtgctcatgtccccaacacattgcttagggtatgagtatgaagatgctgacttggatgcccaagatgctgaggtgtcactatggaatttctcaatttaataatgtgttttggtttggtttttgttgttagttttttggagtgaacagtgtctgtactggttttttattagtagtacggatactagttataggtggaaagattgcgagggaccaaaaggaattttcttttgaacccttttttgtcaatgtaatcaatatcacgtatatcatgaagtgaatcccttcaagtttatgtataaattaaataaaagaaaaatctagttttggttatgaatctttgttaaagtaaaatatcaatgtgagttgagtatgtgaagtgtgaaccttaaacttgatacaactcgtggtagatcattatttatagttcttttttgccaagtgtacgtacgcggagcccataaaaaaactaggaccacactttatccatgcagattatagtattagttttttagtttgaaaaatgtagataagaagtatatatagttatatatctctttctcctgatggattggatcaaattatttagattttgaaattgttaatcatctcaacagtccttcaagtcttcacagcttcaagtattttgaaattgacacctgagcctgcaataattgaagaggatttgcttggacatagaaagtatgtcttgaactttcctttagaaaccaaaaatctcattctctcacaaagaggagccacgtcgccaacttgaacacgttgaaccgcggtttgatgacccgttccctcttgaaaacagccaaaaccatgttaccaattgtaacttattctatattccttagaagaagctactgataacttgatgaaaattatccacctaatttataaacttctgggtaccttcaaattacttaaataaacgccaatatatatccttttagcattttggcttttataaaatgttcattgataaacattttagttgacttttgatatacagtaaaaaaatatatatagtattaacaaattagaaatctccttaaacaattcttgtaaaatttaataatcttcaattacatga

SEQ ID NO: 236 - DNA, 2896 bp, Glycine max
tgtgaggggttgtgtcggccaccttcgaatttatctcttcatggaagctccgcgtggcggctctatcccatgacacatgaaaaactcattctctcgctgcacataattaatattttgcttcttcttcgccctaattgctaatataaaaattaaatactcttatgttttaaaaatataatacactacgtatatttttttattaagagtttaatagatgcagattatcgatataaaactgtcagccaatcatattcttcgtaggtaatatgaattttaagttatttattataaaattccatgaattaacgattctaaataacagtgtaataattctatacactgttaacacatatattagcttaatttatagagtaaataatgcactaaacagtataacgagaatctatattatcatttaataataaattaaagctattgttatgacaaatttattaatttttataattattttaaaaactatacgagtaataatttttaattagttgaaaaattgaaaaaaaaatagattaataatacataaaatttaatattttaaaaactaaattaagttttctgtaagttaaaattaatactatatttttactttctataaatgttttaataaacacatgaattaataaaattaatttatgaatatacaaaattaaaaatataaaaaaaatacggtcaatcaattaatttgtgacatgagatagcatagtagtactataaaaaaaaaaaacctttcaactcgatctaaattaatttgaacttttattttacttacataattttcttttcgtatttcccatatactcccactcaagtcatagtagtcaatggtcattttccatcttcatataaatagaacgaatacacccacaacatcgttctgtgggtaaacaagtgtttcctgagtctgaacggaatcccacttaaaagtcgttctccttcctcttcgcagctgttatatagtactattttcatttcatatgtttatgcacctctatatatacatagacacatgtaaatggttgcaaaggaagataagataggtaccagctatcacatagtttatttaatccgttatatgccacctgatatataggcatattagctagttaggtaggtatagtagtttaagttaattcaaccatggaagacagggatcactgttgttccaacaattcaacgatgatcacaacaacaaagaaaagaacgggtagaagaagtccaacatcggataagctcaagaatcaacaccgcgagaagcagtcgatgaaaccttaccgtggaataaggatgcggaagtgggggaagtgggtggcggagatcagagaacccaacaaaaggtcgaggatatggttgggttcttacacgacacccgtggccgccgcacgtgcctacgacaccgctgtcttttacctccggggtcccaccgcgcgccttaacttccccgaactcttgttccaggacgacgaccaggagggcagtgattcggtgcagcacggcgcagcagggaacatgtccgctgattccattcgccgaaaagccacgcaagtcggcgccagagtcgacgctctccaaaccgcgcttcaccaccacgcgccaagtaccaactctctcaatctcaagcccgacttgaacgagtttccaaaactcgaagagcttcaagattgatataaatcaaatatcaatatcaatcaatatatttaatttcctaagttctttattaatatatagttttatgtgtgtatatatagatgatgatgcctcggagttggggcttgaaactaattaaccccttcccttccccttaatttagatatatcccttttcttgtttttccgtatcttcaatcataatatcaaatcaaagaagtattattattttctagggtttttgctaattgatatattattatcatatggttttgatacggtgtaacgtaacaattactaacatattaagtggccagtattcgtggtgagatagaaagatgtttcatgattcaatattattcttcgttgagttcactgttttgtttggtgctggagaatatatctttttcttcttcttctttcgtgcaaaaggggaaggaggagttaagaatttccgttcgttcagattctttctctttaatttatgggcttgggtttttgtgtgaaaagattattcgctttattattaaatgttatcttgatgattcggtggatctaattaaatacgtgaaggcgcaaatcttgagtgtggatattaaagatgggagcagctagcggtggcccagcgtgcgagggacattaaaaataaacaggcaaatacaaatgttcagtttgccgaagtggataaagtgataaggcagagtagaagcaccacaagaaagagaagtagcttcttgtgaccaggtggtggacaccacacaaaaagaatataaaagagttggtgtattgtttatactattttttaaaaatattttttccttctataataattttatgataaataatatataaacatttattgtataaatttttttaaaataagaatggtcaagactactcgcaagagggaggaggctagtgtatctcaatatctcacttctcacagaaagagtgagagattgtcgtttgtcattgtcatggaaaagttcagcttacagatggccttgtttatctgagattgatatacaccgttggtataagaacgcaattggcttctttaatttgttatttgtgttgttgaaataataacttctgtctttcatttctttttgagaataaataaataaatttaatcttaaatttggtgtaaaatatatataatttgttctcagagttaaatgtaatatttctagttagcatgagaatgatccgtatatatataatgttatcttcca

SEQ ID NO: 237 - DNA, 4186 bp, Glycine max
ttaattttaaaaatatttatatcataattaatttatttactttttaaattgtgaatttaaagttcacagttttgtaaattgcaattattttccaaaattttacgcatcagattgttttatactaacattttttaaaataaaataaagtcgtagtgggacctcaactcaactgcaccttctagaaaagggtacaaaatcaaagcatggaaattatcaaattaccccctggcttgccccagtaccagtagtctcgttccactttcggcctccctcttccgtagacgcggtttgccacgtcaagcgttaccttttctttattcatactaatcgccatgcgttactccacctaagtaaaaaaaaaaaacgataaataatgagattacctttgaatatttaatattatatgagattatattaaatatggtatagtattatttaattgttttataataaattaaataaatttttatttattgtttgaaaaaatggaagaattatatttttttctaaaacaagaaaggaagaataatttaacctatttaaatagaacataatattaaacattagttatctccatatttcattaaaatattaaaaatagaaaacaaacatatttaatatcttaatactaataaaaataataactaaattgattaaatataatgtgtataacactttgatgttcaaatttttatgagttaaagaaatctcaacactataaagaatacacaatatttttactcaataataattaattataatagaagaacttaaaaaaaatattctaacatttaatataatttccttccacccactttccttacatcaaaaaatcaagatgatgttacggggaagaattccaatttcatcctttgacaattacacgcgcaaaaaataatgtcctaccccttcattaacttaccaggaaattgcacacccctcatctatctttatttaatacttgtcttctctcttttccaaccatctcttgctgcttcactcttcttcaattcatatcatatcaattagatttagagctaaacataaaattgttttcacataccatggacaacaacaatgacttttggaaattcagtgaccagttgaggcttgaatctggtttggccaatctgtctctgaatgattattccatttggagcaacagctacagctccaagaggcctgatcagaggaggaactttgatgtcaagggcagtgatttcaacaacaacaacaactcatcaaaggcttttgatgatgatttcaatgatgggtggaagatcaccaattccaatggaccccttttctctatgcctcacaacaacaacaacaacactcttgaagttggaggcttcaacaagggaggaggaatctattccaacaccaacaccaccatttcctcctaccatcctaataaccttaacaacaacgcttttggaggcttcaacaagggaatctattccaacaccacatcctcaccctatcttaacaacaaccaccaccacctcgacgacaacaacaacctcaacagaaataatctcaagggctacaagacatattttaagggtgaagatcagtttcacacacccaaaagtgccaagaagaagaacaccaccaacaacaccaacaacaagaagcatggggacaacactaataataatgatggcacaaagactggtgctgagaagaaattcaaaacacttccaccatcagagtctctgcctaagaatgaaaccattggaggctacatctttgtttgcaacaatgataccatggcagagaatctccaaagacagctctttggtgtgtcccctctccttttttttttcttcttgttttgctctctttatcaaatcttatttttcctttaatctaattcgcggttctctatattttcaataacaataagttgaatcctttgaggaattgatatgtcaagaaattcttcctttctaattctaaattgattttgctgacagatgtttcttgtgctttgtaggtctgcctccacgatacagagattcagtaagaacaataactccagggttgcccatttttctgtacaactactccactcaccaactccatggtatctttgaggtatgtgtgcgtatattttcttttttttagtctgttgttgcatcactttaatttgatgaaaatgcttttgtttttggacatcaagctatggattaggccatctcttttacctttagcagctatggtctaattaaaggcaataataatgattaaatgtttggtggggtttgttcaggctgcaagttttggaggatccaatattgatccaacggcttgggaggacaagaagtgccctggtgaatctcgtttccctgctcaggtatatatcatctcatctccaatcaaattaattttattatatctatgcacaaattatgctaatattaattttataaatttaattaaaatgtactgatgctgtaaaagtaaagttttatattgtccttcaaagtaaagttttatattgtccttcagtcaattgatatatcacatatcaattgaatgatttctgattaaatggcaatattgacggtacatgatgattaaactctaattgtattattacttgattttgttataaacttatgaattttgcatacatgatggttacaggttcaagtgattactaggaaagtttgtgagccactagaggaagattcctttagaccaattcttcaccattatgatggccctaagttccgtcttgaactgagtgtgcctgaggtatgcatcaacttgtggaatatgttactgatccttatggtagatgatgtggtcaactaaattgcgtcctattttttttattatttcaggcactgtctcttctggatatttttgcaaaccagaacagtttcgatgacattttcaaagccattccagcatagaagggtagaaattatacaagaagagagaagttacaaggacaatggataatgaatgaatactgtggattcatattattagagtgtcagaagataattaagacaacgaatattgaatttcagccgtcatatatttgtgttataattactactataatgttatttgtatagaggctgttatgcctggttgcccatttttttcttgttatgggtgtatatgaacatcacataaaagaatacaataagaaggaactaactttgttcatgattttttctgcaaaattacaaattcaacggaatggcctgcattttgtagcttttagtaattgctgggattgaactctaggtgaaataaatagtgagtgcgagcctgtgaggccctgctttaaatgtttttcattcaaaggggagatttgatttattggttcattttggggcattaacatctctgctttaatctttgatatttgcaaactatgtttgagttttcgttggaagatctatttatacatcattaaagggtaatactgatacatatgagtatggttaattttaaggggacatatgattttctgtaatgcctcatatcaattataccacaataaaaggaattcagagattatacaattagaataattttagaaaaataattgatattattaatattcacaacttgtatctactttttataatttatcacctaaattttttataattaaatgtgtttgatttaaaataattacagaaaatttgacccttggaggttacctatttcataacagtgaaggttacctatttataattgttccaagtgaagcatgtggttcgtccggttcttacacattcaacttggagtgtcaattcaaatgttgatggttttgtgtatggctcagtagataataggtagaggagcaaatgaaatttatttcaaatgtgggataattagttaggcaaagctgctacatcagacaatgccatttgataagctggcgttgccttaacactaacaattgcataaactaaaaggaagcatctggctctaatttgaccaaaaaattggaccacagtaactaaactatatataaaactttcagcataaataaactaaggatatttttactcgaggctttgtcttcactctaattctttggttattggttattttttacaaaatcgttgatgaataatgattaacactcactttattacgctttattgggtagagggaagagaattgtgtagagggaagagaatagagcagaggg

SEQ ID NO: 238 - DNA, 6841 bp, Glycine max
cttaatctgtgataggttgaagcatatgaatgattgttgaaccagatcttctaataaagttcccaaccacttgagcataaatcttaaaccctaaattaaaattttacaaataaaataatgaaggattaaatttgcaaaaaaagggcaataaattcacgaaattgagaaaataagaatataaaaataaattaaatttaataactatcagcattattttttattatttgtatgtggaagtgggccaaaatggacgacttacatatactagtggccaataggccacaccacggtccatactgtgagatcagaacaatgcacctacacattggccattgtacatgtagcagatgtgtaagatattacaatgtttacatgaatttaaacattatcatattaaattattattaatttaatatttatcataaatcatactgtatctcacactgtgaattttatccttttttaaataattactctctccgttactatttatatataagaaccaagggagtaaaagtatataatataacatatttagtgttcttgaatacattaaataatagatttttaaacaattaatattcaagccaagattaatccatgatattcgacatcaatatcacatgtcaagataattttaaaaaataatagatttattaaattttataaagataatttaaaaaactaaaatagtaaaataatattttctccattctaaaataattatcaattattttacacaaacaaaaaaaataataaatttatatgatcattcatattaatattaatatataaggaatataaataaaaaataattaaattatattaaaaaatgaattgtattcgaaaaaaaaatattttcttatacgttagacggaataatacacagaaattaaactaaaatcaatgagagatggtggtggaccaaatgcattaatacacgtgcgcaccaacctcttcccttcccttcaaattcaatcaatcgatttatcgctcttttatgtggttggcttcctttcgctctcttctctgcaaatgcttcattccaaggtatgcttccttttgtttaatcaatatccgttcgtttattatttattacaccctttgtgctctgatgatttttgtgcatgtgcaacttctcctattttacgtttggactggtattttattgcaaattgttagcttattttcaattcattgagatctgatattattattcagtggattcacaagtaaagtagtaattgctaactcgtagagagagaaaagctaatcagaaagtgagaaccttttttaatagtaaaaaaatgtaacaaataaaaaaaaaaaatcagcatgagagagaattggcacagaacaatagagttttaccttgaaataagtcatttagatgcagtttacttcaaaatatgtttagtatgaatgacattcattgagattcgtaaacgcagatggttaggactctgtaggctgataaagacaacactcataccgttggaaagaaggatgctgctggccatgttgcttaatttagttcttgcttcctttgtcttcttgagttttatcagagacgggagtgcagggatcactagctctttcattcggtcagagtggccggcagttgacatcccccttgatcatgaagcatttgcagttccaaagggttataatgcacctcaacaagtaagtctttagaagagtaacaaggctgattttattatctattcgctaatagtatttaatgaaactttgacaaggatcctactcctcggaaaccaaattggacatgtgaagcagtttcaagttctaaatctattcctttattccaatgaagctcagctgcattgattgattcctctgtaggtgcacatcacgcaaggtgactatgatggaaaagcagtaatcatctcatgggtgaccacagaagagccagggcacagccatatacagtatggcacatcagagaataaatttcaaactagtgaagaaggcacagttacaaactatactttccacaaatacaagtctggctacattcatcactgtcttattgaaggccttgaggtaattgtttaatcaaattaagtaagtagaaatgtagaataatcaacacgtgcattatatttgcaatattaaaaataaaatcaattgagaactgaaatctaatgcacgatatgcaatatgttttcattttttagataatcacatgtgcttttataattctcatcttgctgtgtgtagaatgtctttgtttagtttaatcaatgatttccccatttcagtatgagactaaatactactatagaattggaagtggtgattcttctcgagaattttggttcaaaacacctcccaaagttgatccagattctccctacaaatttgggatcattggtaagttatctgttattcaatgtttgttctactagaaaatagttttttgtatccttaattatagactctttctatttataatgcacaaagtgtctatcaggatttcgttttgctttgatttcccatgatttttattttgtagctctcacaaatgagtcattgcataaatattgcaggtgatttggggcaaacgtttaattctctttccacccttgagcattatatacaaagtggagcgcagactgtcttatttgttggagatctttcttatgctgataggtaccagtacaatgatgttggtttacggtgggatacatggggacgatttgttgaaaggagtacagcatatcatccatggttatggtctgctggaaatcacgaaatagactatatgccttacatggtaatgtggtaacctgagtataggatgcgtcttagttattcgtgttgtactaaatcatttatagaatgaaatgaattcatcattttctggaacaataaaataataaaccaccatcatggtttcagctttccgttttctctttttcgaattggaagtataagagacatgcattttttattcttctaaactactatgtctggactggtttgttcctttttttggattatgcatggtcatctgcggaatattacttagctgactttcaactccatcaaactatttggttcaaactagatgtcttcttttatatgcatcttattttttatatagtttttgtagcaaattccatgcaattcctttagaactttgtttataatgtttagattaagatatcctaaatttcaagtggcaaataattacttgttttgtacataaaaagtcatttcttattttgttggtgaatggttatcccgatgacagatgctgaagtaaatgttcatgagatttgttgtaataccatgttgatctttgagaagtttcattcagtttatgattttagtctttaacttgcttatgttgaaaacttcatactctttgcatttgatgttaacttgggtcaaatatgcttggtcagggagaagttgttcctttcaaaaactatctttaccgatatactactccctacttggcctccaatagctccagtcccctctggtatgcagtcaggcgtgcgtctgctcatataattgtgctatccagctattcaccattcggtaattaatctcctctttatctacttattaatattccttacatgttgagttgaaagagaagaaattgtttttattcaatcttattcggggttacaacatgtgtgctcctatatatacaatgtgggagttttgattgcatcaatgtttgcaatgaaattctgatgctatgccgagacacggtcagtacaaacaaagtgagaaataggatgcttgacacaaccccaaaatactatattctatatgaagtttaggttcatagtgtttcataaccgtaaaaagttggtgtgcaatggcattaaagtctttacattctatatttctattattcttagtaactttgtttctcttgttagaaaaactatacaagtggagagagaaaaagttgtcataagagaaaataatgctttttcacgggatacaaattttattattgtgtgtttcacaataacagtttctttacgtttcattttcagtgattgctgataaacaaacagaaatgaaggaaaaatatcctaaatacaagcaaagttgtcctgttgaaacagggtaccaatataagcagcaaacatttatttttacaaaaaagtaaaggctttgacttctctacattatgactcaagtgccagtttgttaggaatggtggagagcagcattctggtgtttctaggtcttaagaatgttagatagtgttacttagagctgtatccatttcggttgaatagtcactgccaattatgtatgcttgtcaactgccacattttgttgtgtatttggtcttttgaaaattttctctgtttccttttatggtatttttcgtaatagttatctttcataacagtgaaatacactcctcaatacatgtggcttaaagaagagctgaagcgagttgagagggagaagactccttggctcattgtgctcatgcacgtgccgctctacaatagtaatggagctcactatatggagggtgaaagcatgcgatctgtttttgagagctggttcatcgagtacaaagttgatgtgatctttgctggccatgtccatgcttatgaaagatcagtatgtttttcactttctgctcatttgttttggtcctctcacaacccagacaatatgtttcaataacttgtttgttatcttggtatcaataacttgagcaagagcaatatgtttcttcagtcatctgatgtcacggtggattcttatgtgttgaatttttctgtcctggtttcagtatcgatactctaatgttgactacaacataacaggcggtaacaggtatccattacctaacaaatcagcacctgtttacataacagtcggagatggtggaaatcaagaaggtcttgcttcaaggtaaattaaacaaaccatatctaaaatccttcttgaatatgattatgtcaaagatgtcttgtcatataggttttaattctatccttggtcatgcaggtttttggatccacagccagaatattctgcttttcgagaagcaagctacggacattccacactggagataaaaaataggacccatgctatctaccactggaatcgcaatgatgatggcaagaaagtaccgactgactcttttgtactgcataatcagtactggtaggttccctccaccttttgcttgggcattgctttcaagtagcagggagaaatatgccatatcttgctgttgtgatgaactataagattgaaagttatcattgcatccaaatggcaaggcacaatatagacattctctgccacatgcgtttttactgaagataataatgctagaagtttaaaatcgttatggcctacattccgatagtaattttgagggttggtttttgtgatattttcttcttcgtaaatgttgagaagggtacaaagaaacttccttaagagaacctttgcttatctggtgcacaacactaaaaaaaatctctcgtggagactaatagaagacttaaaccccataagttcgaaacttggagcatgtctagctcagggaatataactgctaattgattactgattacataataacctgcacacagtagattttggttgacaagaatcacaagataggcatgtagcctggttaagagtagcctgtcactctatttttcagagatatataaatcaatgatgcaatttcttgttctgataattgcaatccggttgggttctgataatgcatgcaggggacacaatcgcagaagaagaaaactgaagcattttctattgaaagttattgatgaagttgccagcatgtaatttgaagttgaagcactagcatatttggcgttttgaaaaggataaaaatgtgccccttgattaatatatgcagttcaatagtgtctgagtgagcgaaatgcaggacgttggaaatggttctatgtactatttggcttgtatgcttgtattacaacgctaataagaatattaaatgagcttgctggagaaaaataaaataagaacatattatctattgattggaaatggttccatttcagtgatttatttggcattgttaaattagtaggggttgcaaatccatccatttatccatcatccattcaatccatccacaagctaatccattcaattcgtccattgcaaaaaaaaaaaatgaatataattcaattcatccatttattttatgaataattaatgattcatccgttttttttaaaaaatttaacagattctctaataaatacgtaatagatcaaaattgatctgacttaataattaaagaatttgaggacagttttcaacccatgtaggtcaagaattagagatagttacatcgtgatactttcaaattcattatatactcaactctatttctcactcgaaccttgatcttatattctcaatttctcttcaatttggttgctcttttactttgttcttattttttagtaattacttatctctcttttactaacagtatccagtcacaagtgggatttgattttgagataatagttatcaaggatgtaattgacttgttgcaatatttaatagtacaatttaaagtgctactccatttaataaatgccagataatttgttctgaatacgggaaacaataagagcatcaaaactacagctaaaagacaattatccaaccacgagctgttaattttacatcccatcatcaatggagcatttataggataatctgatagagaaattcatatatccttaccattattaccatgcctgacaagacgtatgtacatttgctaactgtaattgctattaagata

SEQ ID NO: 239 - DNA, 3494 bp, Glycine max
atatatatatatattaagaagaagaaaaaaagcgcaagagcatcgatcaaatgaacgaataatgctcaattttcttttattaaaagtataatttaatttatacatattgtatgatgtaatattggtataaaatatttaacatatttgatgataaatatttactaaaaataaaaatttgtatgattatctttatcaacacaattttttttccattcataaaatttgaatgtgactttacttaagagattcaatataattaactatcatcaaacagcttcctggtatatgaacatgcaggctttttctttgtaatctgaggggtatttcttatgcctcatatgaatattattctctctttgccgtttcagaaaaaaaaaaaaaaacttaagaatatacatgcatatatatatatatatatatatatatatacatttatcttaaatatatattttaaagtaattattataaaaataaattattttataataaagaaccatctatgatcaaataaatgatatatataacttgaatttgcctgctgttagataatttaacaactaattaactgtaagtaatctcagttccttaccgctagaaaagttaacatttaatgttctgacacattcagaatttgttatgtacgtcctttacattacacccaatactttatctttcaaaatgagtttctcacgttaaaaaaaaaaaaaaaaaagttgcatccaacagactttaatttgtacaaaatgcgttttgattattaaattctaaaaaattaacctacctgattgttttttttaaaaaaaaaatatgttcaaccaaattctattgaagattaaaaaaaaagtagacaaaaaacataaaagaaaataacattctggactagtaaaatgaattattggaccgtaaaaattagcttattacagttcagaaatattttatcctctatgcagtaggcagaggtattgtctatttaaagaagcaaatcctcgatgaggaaagtgcacaagtgagtttgttgatcgagataactagaaacagtgtgatgaaaatgaaggtccttgttttcttcgttgctacaattttggtagcatggcaatgccatgcgtacgatatgttccctctccgaatgaacactggctatggtgcccgtactccggaggtgaaatgcgcaagttggaggcttgctgtggaagcacacaacatctttggctttgagaccattcctgaagagtgcgttgaagcaacaaaggaatacatccatggcgaacaatatagatcagactccaaaacagttaaccaacaagcttacttttatgccagagacctcgaagtccatcccaaggacacatttgtgttcagtatagatggcaccgtactctctaatattccatactacaaaaaacatggatatgggtattatgctcttagttaattttcttctaatactctctttttccgtttttgctattactaggttactcccttatatgcgcatcatttattttcaactatttttggtattgatcgagtttcggtgtttggcccgactaacaacattaaggtttctcatcacatgcatgtagatttgaaaccttcattatatatgacattttatgattagatataatataaagaaaaagtttcattgtgagtgcataaatatatatatatacagacacaggcacatacatgctttcaggatcgtgttcattgttcttaatgcaatattttatgtgatagggtggagaaatttaactcgaccttgtatgatgaatgggttaacaagggcaatgcaccggcactgcccgagactcttaagaattacaacaagctggtgtctcttggcttcaagattatattcttgtcaggaagaacactggacaaacaggccgtaacagaagcaaacttaaagaaggctggctaccacacatgggaaaaattaattctcaagtcagttttcttttttctctatactatattctcaagtcaattaattctcaacgttgcaccaaatctgccaggaaggaacagtttatagataatcagaaattatataattattttaagtacatggtgcgatatgagtttgaaatactagtagctaattggatctatttttggttggtgcagggatccacaagatccttccactccaaatgcagtttcatacaaaacagcagcgagagagaaactgataaggcagggatacaacattgttgggatcattggagaccaatggagcgatctcctcggaggccacagaggcgaaagcaggacctttaagcttcctaatcccctgtactacattcagtagttccttcacctctcaacaatctagcttgctcctatctatctatatgtaataagatgcgttcaaataggggcactagcttcactttatgttgtttcagctgtgtgtcaacaagtcatgtaagagacttcactatgttgttttctctttcgtggctttaataaattatgcgcccttgttccatactttgatcttttcttttcttttctttttctttttaagtcaaagtaattcattattatcaaactaatgaaaaatactaaccaatatcctaagagaattggttaaagaatttaaaataataatatttttattaagagacacaaaattatgttatttataaattttttttattttcatataacttacacaattaatatttttgtcttttagttttataacaaatgtcttaaaaacactaattaaaaagattctttaaaaaatagtcttaagaaaatctgaggaacttagctaggttttacaaactaatataaaatgtgaattaaatatattttttccatttaataatttagtattttttttcatccattacattattttgaataataaaaaatattataaagtgttttaaggatgaaaaataaaagaatatattttaaataaaataaaaaagaaatttgcaggaaaaaaatatctaaaagataaagattttataaaatcgagatcgggaaagaagtgcacaaaatcgacgtcgtgaaagaagtgcacaaaatcgacgtcgtctattacaccatataattacactgtgaaccgacagttggtattaacacaatggcccaatagagtagaccgagaaataattatctgacaaatatactgttcactaaaaacaaaaaaatgatgagaaagcctgaaaattacactatatatatatatatatatatatatatatatatatatatatatatatatatatatatatgaaatataataactttatactatcatttaattaaaaataattatttaaattattttaaaataattattttaaaaatcaataaatttatcatacataataaatatttaatataaatattgattaaatgattatataaaaaatttatactatctttgtataatccttttttcatataaaaatattagtgaatggtgttttgagtttcaaaattttataaaatttcgttttaatttctaattt

SEQ ID NO: 240 - DNA, 4341 bp, Glycine max
aaatattttgaatatttcaatatcaaccaatttaaatatttttttaaaggttaaaattatagtcattttggaacatagacagtaatatggagctagagttatgttaaatacaggtcagaaaaataaaactcatgaaaatttgtaaaccaacgaaacttacaataagttcagcagtgatcttttgtctcatttttttacatttctttagtctctttattttttggttaaacgttgctttttagtttattatgttttagtaatttttttttactttattacattaaattttaaaatttctattttgttttttttatgtttttgaaaattttattttgttaatttttttcataagaacactaatacttagaaaagaataaaaaaaaaaaaggaaagttcgatggaattcaagctcatgaaattttatgttaaaaacatgagtaattcattaatattttaaaatttaaaataaaaaaaaaaaggaaagttcgatggaattcaagctcatgaaattttatgttaaaaacatgagtaattcattaatattttaaaatttaaaataattaattgttttacttatattaaatagttggtgaaaatttaaaaaaagatgcacgtttaaacaaggttggaatcgttttgattttaatttcaccactcgagtgggatgcacatttagacaaggatggaatcgtttgacttggatttggttactccttcccccaacacgctgccaccttctagggaaggtaagggaccgagtgaccgataacaacaccgatttccaaatatatatctcattcctaagctcacacacatcttttacgttacatttcattattagatgctttcaatcgttaagacacatgtcaccaccaaaagagcatctcataacaacgtgtcacacctcccaagcacacgtgtcactcacaacacaaccctcacctatatataaattatcaaaccctccttccattcctccacatctcaatctcaatatctacacaaaagtgttccacttgagtgaaaagtagtgtgttaagaactaaacaatttttcaatggcgtccaagaaacaagaggagcgagctgaggcagctgcgaaagttgctgccaaagaactcgaacaagtcaacagagaaagaagagaccgtgatttcggtgttgttgctgaacaacaacaacaacatcatcaggaagatcaacaaaaacgtggtgtaatcgggtccatgtttaaggcggtgcaagacacctacgagaacgccaaggaagctgtcgttggcaagaaagaagctactaataacgcgtacagtaatacagaggttattcacgatgttaacattcagcccgatgacgtgtcggcaacgggggaagtaagggacatatcagccacaaagactcatgatatctacgattctgccacggacaacaacaacaacaaaaccggttccaaggtcggagagtacgcagattacgcttctcagaaggccaaggaaacaaaagatgcaacgatggaaaaagctggagagtacacagattatgcttcgcagaaagcgaaggaagcgaagaagacgaccatggagaagggtggagaatacaaggattactctgcggagaaagctaaggagagaaaagatgctactgtgaataagatgggagagtataaggactatgctgcggagaaagccaaagaggggaaagatgctactgtgaataaaatgggagagtataaggactatgctgcggagaaaacgaaagaggggaaagatgccactgtgaataagatgggagagtataaggattacactgcggagaaggcgaaagaggggaaagatacgacgttggggaagcttggggagctgaaggacacggcttcggatgcggcgaagagggccgtgggttacttgagcggcaagaaagaggaaactaaagagatggcttcggagaccgccgaggcgacggcgaataaggcaggggagatgaaggaggcaacaaagaaaaagacggcggagaccgcggaggcggcgaagaataaggcgggggagatcaaggacagagccgcggagacggcggaggccgcgaaaaacaagaccgcggagaccgcggaagtgacgaagaataaggctttggagatgaaggatgcagcgaaggacaggaccgctgagacaacggatgcggcgaagcagaaaactgcacaggcaaaggagaacaccaaggtctcaactttgcatcttttaaaggataatttgtttatttttccttcgagattagttgaaattacttttattctctttaaaatggtgcatgtatctgtggaatgtagtggatttcgtcctcgtctgcttaaaggactaaaaagttatcatttttaatatgcatatatctgaaatgtgctgatgtaagtacattttgtccatgaatctcaccacatatatctgaaaatgtgttagataagtagatgcaatggtgtgaagtgtggcagaagagtagattttaatcatgaatcttcgaatgccactaatgaagaaggttgaggatgaaaaacactttctctctccatattttgatatatgagatgaggggactaaaatcacttataagattgaaaacctaaaaactagttgtacttatttattaacaatctaggtcgttacttatctgcactgccatgaatgtgtatgttttgttttcctaattttatgtatttgaactttctgaatccgtcactctgattatacatgggtacattaatgtgcatatactagttgttgatgtttgagaaaattgaatagtttttgtggatgtgatgtgatgcaggaaaatgtgagtggtgcaggtgaaactgcaaggaggaaaatggaagagccaaagcttcaaggtaaagaagggtatgggggccgtggagacaaggtggtggtgaaagtggaagagagtcgaccaggggcaattgcggaaacgctgaaagccgccgaccagattgcgggacagaccttcaacgatgtaggacgcttcgatgaagagggtgtcgtcaatgtggagcgccgcaagaaataattaaaacgtgatctatgatacaacaatattagtatatatagacgcatgcagtttatatagtatatattgtcatgttgtatgtttttacattttggtttgcttgtttacattctcttcaaaaaaaaaaaaatgtgtagtacgtgtaaggttttgaagattggttctaggctccgtgggaaccatttcaacaataaacattttgcgcgttcttgtacacgtagtgatgagaagagatgccttatgggcagtatcatctaaaacttattttcatccatcatagaatttggatctattggactggactgaactgaactgaatgatccttttttcttttttaatttcattcactaacaaatacataaaacaccagatattaacttagccagtatgaattttaactattttgtctaatgctatgacttatcactgtctgtatcatctttaattcttttttcatattatttatattaaataaaagttaataattaaaattaccttccaacttgtatcgcgcatctttcattttatttgtgtggataaaaataatcctttcacttggaatctccattttgaaatgatcattctaaaaattatttgtgtggataaaaataatccttttatttggaatctccattttgaaatgatcattctaaaaggtaaattttaccttttggaatagatttttggaacaattattcttattctagaatagcttagagaactagaatagcttagagaatagtcattctagaacaaaggaataggctttctgattccaaaataggtgttccaaaaaatgcaatcaacatttcgaattgtatgtaaaaaaaaaaacatatttttgtaacaagtattccggaagctttgttttactattatgaaacacctattctaaatgaaagttgtgttcctgaatgatcattccctaaccaaaaataaaagcttttggaataccagttatgaatacagttgtcactattcatcttctggaaaggattgtccataaaataaaagcttagtataaaaaaggcgaaaatgcacttgcacgtcaacccaacctcaccggagctatgtagttggaagaaatcaatggtggagtcggcacaaatggagacgaagaggaagacctaatgacagagcaaacacaaatgaagtacaagaacgggtgggactccctcgtggagtagcatgctgaggaagagaaaagatataatatgaagtgggtagtttgagaatgtttaaaaattgagaggtgtaggattcaaatgttttgcccagtgttttattcagg

SEQ ID NO: 241 - DNA, 5894 bp, Glycine max
ttagtatttttagttatgtaaatattgcttttttgggtagataatgactcaattagttattatattttatagtgttgattttttttattagttaccaaataaaatctccaacattacgttggtcagaataaaattaaacttaaatctcttaaataagacattaaatttaaatattatggatggaaaaaaaatcattaaaggagagataacgatgtatgataagatttttttaatctatttttaaaattgaaatcatagaaaaataaatttaaaaatatgaaaacttgtcaaaacaatccaaattgaataataaaaaaatttaatttgatttaattaaaatttaatattacattcaagtcagacaacatcaaaccatatattatttatatgcttgatttgtatgatttttgtaaaaaaaaatcaaactaaaccacgcgtgaacacttctaaatctatcattagtatgctattattttgaaattaatattaaatcatattttatttcaaaaattgaaaaatcctattatatgtaaaatattattgttttatattgttatatttaaatgttatttttcatattatttgatttactaaaataatacaataaaaaattttagtttatatgatatgattaaatgactattatatataaaaatatttacctttaactaaaatttaataataataacaataatattagcaataagaagaagaagaacctagatgattgagtcttgtaagttgaggtcataaagatggacggcacaggtgttcccaacactagaaggaatgggattggttgaaaaaacaaaaagccaaatttctattggtccacgtcatcatcaatgacatgttcgagcgtcaagcttcaagttcacgaaatgaccaggtttcggtagagtccctcaccacactacataaaagcctcgctccctcgtgccatttcaaaacccagaaaccaattacaaattacactctttgccctcgcaccttcaacttaaccttttctactcataatcttaacaacttgctagaagaagataaagaaagagaaaaagtgtgtgtgtgagagagagagcaatggctggctcgtgggcacgccgttctctgattgttctggctatcatttccttcggtaactttcaccacataatagatctgatcatgttttcttttagctctttgctgtttttgtttaaatgcgcaagtggaaaaatgtaaccagatctctctttctttgaacttttttttggatctgttttgtttgattcgttgtgttacgtagcggtagatcagtgactgagatcttagacgtagttgcttaggaggatttcgtaaatcgtgccatgttctgctttttggtgacgttctttgcgaactcgttagttccaggatctttcacgtttgagtttgagtaatatgcgtttctctgcatctgagaatttcgtcaacagtgatcagttggagttgttattccgatttccgagggagcgttttgtttttgaaaatgctaattgttgcaaaatacttttggtaaccaacacatttatctctgatttctgttcaatcagattttatatttcgtaactaacacacgtacctttgatttcttttaaatcagattttatatattttaaagtttttttaatcaacatttgttttcaaaattatcattggtcgacgttaatgtttcgtgcaaatatgtttctaactaactagcaatgctcgtttgttttttgttttttaagttgtcgataaagattttcactattaagcggagtgattagtattagccatggaaagaagttttgttccgtttgttgcttaagattattgctttcattgcatggtttttcaaaggattgacgtttgcgtatttgcgatttgaatatgacatcgtgaagtttcctccggctgataattgaatacattagtaaaaagtataaagtagaaatgtctttatggtaatttgttaacggattcatatcattattgtattttatcgtttattatgctaaataaattttagtttatcgggcttgtcatttgtcaagcactattatgtgcaaatgcagaaattaattccattttgatgagtttcagtgttgtaaaactgcaattatgtaactaacattgagatatttttccataggatgtttatttgcaatttccattgctaaggaggaagccacaaaattggggacggtcatcgggattgatcttggaacgacctattcatgtgttggtgtttacaagaacggccatgttgaaatcatagccaatgatcaaggtaaccgtatcaccccatcgtgggttgctttcaccgacagtgagagactaattggagaggctgccaagaatctggcagctgtcaacccagaaaggaccatctttgatgtcaagagacttattggaagaaagtaagacttactcaagttgatttttgacaatttgatttgatgggatcaatggtgactgacatttatctttttgcaggttcgaagataaggaagttcaaagagatatgaagcttgttccttataagattgtcaacaaggatggaaaaccttacatacaagtgaaaattaaggatggtgagaccaaggtgttcagccctgaggaaatcagtgccatgattctgactaagatgaaggaaactgcggaagcattccttggaaagaaaattaatgatgccgtggtcactgtcccaggtaactggaagtctggaacaattcacgacttatttcaactgcaatttgattgttttcctcctgcttttgcctttatttcaatatctcacattttcctttaaaatgcacagcttacttcaatgatgctcagaggcaggccaccaaggatgctggtgtcattgctggtctcaatgttgctagaattatcaatgaacccactgctgctgccattgcctatggattggacaagaaaggtggcgagaagaacattctagtctttgatcttggtggtgggacctttgatgtcagtatcttgacaattgataatggtgtttttgaagttcttgccacaaatggagatactcatcttggaggtgagtacttttatacacatacacacaagctaatgtctgttattctatggaaatgaaattatataatctttccttaaatttttccttttgttgctaatgtctgctattctgtttcccctttccaggtgaggactttgatcagagaataatggagtacttcattaaattgatcaagaaaaagcatggaaaggatattagcaaggacaacagagcacttggcaagctgaggagagaggctgagcgtgcaaagagggctctcagcagccagcaccaggtccgcgtggaaattgaatcactttttgatggtgttgatttttctgagccactcacccgagctcgttttgaggagttgaacaatgatttgttccggaagaccatggggccagtgaagaaggctatggaagatgcaggattacagaagagtcagattgatgagattgttcttgttggtggaagcacaaggattccaaaggtacaacagcttttgaaggactactttgatggaaaggagccaaacaagggtgtcaaccctgatgaagcagttgcctatggtgctgcagtgcaaggaagcattttgagtggagagggtggtgaagaaaccaaaggtaccgtagtctgtaatgtagcttttaaattacttgtcccgaagtcataaatattatttacgcaattagattgctaagcataacactttctaatcgttgtgtggcaatatctatccagacatccttctcctggatgtggctcccctcactctcggaattgaaactgttggtggagtcatgacaaagttgattcccagaaacactgttatcccaaccaagaaatctcaggtgttcaccacctatcaggaccagcagactacagtctccattcaggtatggtgccattattcaatttgcattaaagggcatgatgcgtgtttttcttctaaatctaaaatgcatgactgtagtgaactatgacggggttgactcgaattcactgctttttcttaatacaggttttcgaaggcgagaggagtctcacaaaggattgccgccttcttgggaaatttgatctgtctggaattcctccagccccaaggtttgttacctgctttgatgatgcagtgtcctctctcaatattgctcaatttaatgtttgtaattcattggtattttatttggtaattgaacaggggtacgcctcaaattgaagtgaccttcgaagttgatgccaacggcattctaaatgtgaaggcagaagacaagggcactggtaaatcagaaaagatcaccattacaaacgaaaagggacgtcttagccaggaagaaattgagagaatggttcgcgaagcagaggagtttgcagaggaagacaagaaggtgaaggagaggatcgatgctcgcaacagtcttgaaacctatgtatacaacatgaagaaccagatcagtgacaaggacaagctcgctgacaagttggagtctgatgaaaaggagaaaattgagactgctgtgaaagaagcactggaatggctggatgacaaccagagtatggagaaagaagattatgaagagaagctgaaggaggttgaagccgtttgcaacccaatcattagtgctgtgtatcagagatctggaggagccccaggcggtggtggtgcatcaggcgaagaagacgaggacgattctcacgatgagctctagattagtcggagtctgttaaatttttatgatagctgggaattaagaagtcccctgcgcttgcttttttggtggcgatgataagatactttgtgaaattacttgtactttacttttttgcttagttttacgacgaaacttcttcagctgtatgaatgagccttgtttcacttctattctcttacgctcctgtttttcgcgtgcttcgtgcctgttttgccgaccataagtttttaaatcaagtctttgtaatttaaaacaggaaacctccgtaaaatattattgagccattttataaaaactcacgtacggatatcaaatttctatcggttgctatttgtttttgatattttacctggagtttgtgacatggctacaatagagtcagtcataactagaaccgtagacgtatagcgagtgaatgaagtttaaagatggattcgtcaaatgcagcgtccggaagttagaatttttgtttatgaaatgatgttttctattgttttaaccttttttatacatgtcatgcttcttttacatagtgaccgcaccacttgcctttctattctgtaacaatggttactgacaagggatactgttatcaaatttgatgggattagaaaatgaaatggagaagctgttatatataataccttgatcacatgcagaacatggtaatggatggctttggtcatattatgttagtccctgtttgttcaatgtcgagaatgcgattcgaatgactagacgttaaggatttatggtaacgaaattcgttattttttttttgtttgtttagaaaaatcgtggattttgttagaatctgacattttgacattcttggttcatctatacgtcaaaatctatttcttctatatctatttttatatgtttgaggttttataaccacaattgtacaaattctattgtctcattgcctcatctaattttaaacggacgatttagggacctaaaaataaatacttttgggaaaacaatttttttactagaaattgaaggaaaaagttcagaaattgacatatttatagagacttgtagattaattcaaccttaattttttaatttaatttggttgtggttaacaagtaccaaaggactgagcgactatgaagccttgaaatagcagg

SEQ ID NO: 242 - DNA, 3324 bp, Glycine max
ggtatcagtactccatagaccataaaaggtgatctcagttactttacccaacttaagggatgatcatgaacgtggttctctttacagaaatgtgtttcttatagacaataaaaaatgtttagcgaatttgggattattcaagaaattaagttgtttggttttccagaaggtatattctaaggatagcctttgcttattccaattctcttgctccacatgttcagctgcaaagggaaaggcataaacgagaatcctcctttggaaaagtattaaaatacgcagtttcaatttgcaaaacaactaaagaaaagaaagagattcaacttgcagaagaagaaacgaaattaatgatcaaaagaagaaacgaaattgattacttttattcaacggctaattaaagagaattgatgcttgaaacaaataatttgattgtcattctaaattttcgcaatgcaaccttgtactgtagccgttaaggtgttcggtaacttaaaattgatgcaaaaatagttatcggtgataataatttatttatgtcaattgatatctttaattatctttgatatatatttgcataattgaatttatgtcagagtcttcaaattttcgaattctgtataaatttacctaatttatatatgaaatttgactcgtttaaaaaaatatcattttagttaaaataaaatttatacagaaaaataaaaataaaaataaatattttatttttatgtaactttatatttattaaataaattaatggttatattttttgatttaataaactaggtaagaaaactttgaagttttaattataaattaattaatggactataataaaaaatttgaagtaggagtataagtgaaggcgtgtatcgcggtgcgcaaagcgtgaaacgtggtgtaagagtgaagggtatccaccgaaggaatattcggttccaatatgcattgattgggtgacttttctctctataaaaaacagagtaaccccaaatcgcaaaagctaagaaagaaaagagaagaaacgaagatagaatgtgcacagccctaaagacgaattaccagcttagcgaggagatcggtcgcggtcgtttcggcaccatcttccgctgcttccacccactctccaacgaaccctacgcctgcaaactcatcgacaaatccctcctccatgactccaccgaccgcgactgcctccagaacgaacccaaattcatgaccctcctttcacctcacccaaacatccttcaaatcttccatgttttcgaggacgaccaatatctctccatagtaatggatctctgccaaccccacacgcttttcgaccgcatggtcgatggtcccatccaggagtcccaagccgccgccctcatgaagaaccttctggaagctgtcgcgcactgccaccgcctcggcgtggcccaccgcgacattaaacccgacaatattctgttcgattcggcggacaatcttaaactggcggacttcggttccgcggagtggtttggggatgggaggagcatgagcggcgtggtggggacgccgtattacgtggcgccggaggttctgttggggagggagtacgatgagaaggttgatgtgtggagctgtggggtgattttgtatataatgttggcggggattccccctttttacggagattctgcggcggagatctttgaggctgtggttagggctaatcttaggttcccttctagaatcttccggacagtgtcccccgccgccaaggatctcttgcgaaaaatgatctgtagggattcttctagaaggttctccgcagaacaagccttgagtaagttactacttgcttctgttttcttgtttgatataatttttggggggttttgtgttgatggaatttttggatgttttgtttttgtaggacatccttggatcttgagtgcgggtgacacggctgaactcacttgagaatgtagctagagagagacatgacctaagttacatggtgcagtgtagctaattttgctccttttgtcttttctctctactgtctcaataaggtggtctactcgtggtggcagaggaaggaacggaacagagcacgcttctgtagatttttgttttgttttaggaatcttatatctgagactctgtatgagtcgagagaatcttgtttttccactctcggtgattttctctctgtgtagtagaaagtgagaaagtgggtgatctcccagactctcttcccccttgtagaaaggagtttgtttgctgatatccttctggttttttgtatctgtaaatcataaataaacaataattttgaatggtgtttaatttaatctttctggttttgtggttttgatttctgtttttttaaggtatttaataagggtgattcttattagtaggtgaaattagatgaatttttaatgaacatttaagtgcatattttaaattttatttaattcacgggaagaactgttattgaaaataaattacaagtaaagaatataggttcattttgtttgaagttttgtgttgtaagaataatttaaattttcaatctttaaaatgttctttagatgaagatattattttattatttaaatttaggatactgattgatataaagtatatcgaaagggtccttttaaatagagaaaaataagaaaactcttaagataccgaatagttattgaaatgtgtgtggacataaacaagagaaggtaaaattgtgtcatatcctttcattgtgaaggggtttgtcacacttgaaatttctacttgacaattgcaccaatcaacttgactgagtgtttagcacgacgaaagaactatcaaatgggaaaattgcagtcaataataaactctagtatttattaaatcaactgttaggtctgactataaagtaggatgttattatgtttctttttctaaagcagtgggctagtggtgtctctggaagactactggaacttttgtaaatcttcttactggcttgaagaaacaaatagagtgaaaaaaggaacagataacacaaactgcagggacctcaactgttaaatttgatttctaacttaataaaatatgtgtaaaaatattttgaaataattttgggtgagtactattatttcagtaacacttttccacggtgtttttctactaaaaataagatggaaaaataataaaaatatattataactgatactataagtcattatattataaaattgttaagtaaaaataatattatcctattttttttaactgttaaagacttaaaagatcatattcctcctcaattattgtgccattcattaaaataagggagtataagtt

SEQ ID NO: 243 - DNA, 3969 bp, Glycine max
tacaattttttttattgaaaacctaaaatatatttgactctaatttttttgctgatgcaagtctaaatttaattaaatttagacctaaaatatattgaaaacctaaatcattttttacaagataaaattaaattcttaactacctgttaagagataaaattaggtgtcaatcatattatgacatgctagttgtcaacacatttctttgactgaggcgcccgcctattgagctcaattgcaaataaaagaaacgtaatagatgatacatagatttttcgtgattcattatattttcgaatatagttggccgaataatctcatagtaaatttaaagaataaaaatatttgatgaaatttctaaaaccataattttaagtaggattaaattctgatgaaaaaccaatctcataatgaatctaaagaattaaaacttacaaaaatatttgatgaaaattctaattatgatgatactaaatcataataataaaaaaaaatatgatggcagcgatcaagacacgacaacatttcatttatttgaccgaggctgggtcacgaacgagtagcattccaaattgaaaatcgaaaaaaagaaaaggcgcagccgatcttagaccagagtatagtacatgtaccaaagaagtgtacctagtaggtgaagaagacaagttgaaaacaatcgccatcttaaaatcttttatttatttttttgactgaaaaaacaaacaactacagtactttttgagttttggaccattttgttaagtaaaatatggaaacatctgcatttaattcttgattcatttgtcactcttaatatattttcttgttccttaatgtcctctttaataggaagaataacaattttaacatgataaaaagggtggtaggcccacaagaattgaattgaatacaacaacaaaattccccataagtagagtatggtggagtagatgcttataaattggaatcttagaaggttgtttcctcaggccaagagcttggaaaattagcctcacaaaagcaaagatcaaacaaaccaaggacgagaacacgatgttgcttgaacttgcacttggtttattggttttggctctgtttctgcacttgcgtcccacacccactgcaaaatcaaaagcacttcgccatctcccaaacccaccaagcccaaagcctcgtcttcccttcataggacaccttcatctcttaaaagacaaacttctccactacgcactcatcgacctctccaaaaaacatggtcccttattctctctctactttggctccatgccaaccgttgttgcctccacaccagaattgttcaagctcttcctccaaacgcacgaggcaacttccttcaacacaaggttccaaacctcagccataagacgcctcacctatgatagctcagtggccatggttcccttcggaccttactggaagttcgtgaggaagctcatcatgaacgaccttctcaacgccaccactgtaaacaagttgaggcctttgaggacccaacagatccgcaagttccttagggttatggcccaaggcgcagaggcacagaagccccttgacttgaccgaggagcttctgaaatggaccaacagcaccatctccatgatgatgctcggcgaggctgaggagatcagagacatcgctcgcgaggttcttaagatctttggcgaatacagcctcactgacttcatctggccattgaagcatctcaaggttggaaagtatgagaagaggatcgacgacatcttgaacaagttcgaccctgtcgttgaaagggtcatcaagaagcgccgtgagatcgtgaggaggagaaagaacggagaggttgttgagggtgaggtcagcggggttttccttgacactttgcttgaattcgctgaggatgagaccatggagatcaaaatcaccaaggaccacatcaagggtcttgttgtcgtgagtttcctgcttcattcattgatcgaaatatgcagtattttgttaacaagagatcgagaattgacatttatatattcatgtggtggcaattaattaacggtacgcattcttaatcgatattgtgtatgtgcaggactttttctcggcaggaacagactccacagcggtggcaacagagtgggcattggcagaactcatcaacaatcctaaggtgttggaaaaggctcgtgaggaggtctacagtgttgtgggaaaggacagacttgtggacgaagttgacactcaaaaccttccttacattagagcaatcgtgaaggagacattccgcatgcacccgccactcccagtggtcaaaagaaagtgcacagaagagtgtgagattaatggatatgtgatcccagagggagcattgattctcttcaatgtatggcaagtaggaagagaccccaaatactgggacagaccatcggagttccgtcctgagaggttcctagagacaggggctgaaggggaagcagggcctcttgatcttaggggacaacattttcaacttctcccatttgggtctgggaggagaatgtgccctggagtcaatctggctacttcgggaatggcaacacttcttgcatctcttattcagtgcttcgacttgcaagtgctgggtccacaaggacagatattgaagggtggtgacgccaaagttagcatggaagagagagccggcctcactgttccaagggcacatagtcttgtctgtgttccacttgcaaggatcggcgttgcatctaaactcctttcttaattaagatcatcgtcatcatcatcatatgtaatatttactttttgtgtgttgataatcatcatttcaataaggtctcattcatctactttttatgaagtatataagcccttccatgcacattgtatcatctcccatttgtcttcgtttgctacctaaggcaatctttttttttttttgaatcacatcatctactataaactatcaatccttatattaattttgagttgccacatcatttatcccaatttcaatatttcattttcaatttataagatgagtaattcattccatctgtcctgtatcgtggttggattctagataagattcaaataattttaattttgtaaaactttctatcctccaaaataagttattgaaaattgctattccagtacaaagattggtgcccaaatgaagcctatacaaaaatacaagcaagctgcactaatttaaaaacaacaaaaacaactttgtaatttaccaagctactaaatcagtcccaaaaccatattgtttggcagatcacaggctccatcacagctctatgatatgtaaatatcaccatggtcccattgctttgtttgtcttaatttatttttgtaaataaataatatgaaaagaaatcgtacgcgtggcttgagggaagaacataactattgaatttcctttgatttcttcattggatttccttttatttcttttgtttctcagaaacttatcgaatctcttcacaaaatctgaaatcatcatcttattctcctctacttttttttatagttgcatttcccactaccattttaggaatgaagggaccaatttcaatgacttcccatatatttaaatctattgcttctataaaaatctgcattcgagtttttcaatagtgataaccctcgccattgaaaacaaaaggcctattaatagaatttctctcgaaatggaaagttagatgaaaccatatttattcttgaagtttttaaactttagataagaaacctgctctgataccacttgttggacaagtggcctcaataacttaagacacgagggtgaattaagtcttacaattcccactaacaaacttttaaccccctcctaaatgatagattcaaaatgcagaagaaagcaatcaatttaataatgttctttaaacatgcaagacaaaattgattgcaataacataaatgacataagggaagagagaattgcaaact

SEQ ID NO: 244 - DNA, 4066 bp, Glycine max
aatattacataagatacttttttggggggggaattgtatttactatgaaagtcatttgatttaaggcttcattaaattaacgctgcagtactgtttggtttggaattatgccattcaagacccaaataagagtatgcacgtatttagatgtgaggaactttcaaaaggttggagttgagtctgctaatttgtaattttctcgtttggaagctgttggcatgttgctacgttatttggcatgtaagtggaataacaacgacgtagaaatacttttattttgtgcccaaatcatttagcaaataatacaaacttgtttctttgctacaacgcacttagtaaagtcatagacaaaaaaaattaaccataatgtgcgagatcaaatctcataactcttcttcccccttctccaggggattgggaccttcatctcttgtgaacttcccttaaaataaaacccttacatgcattaaaaacaagttaatggtaaggtaattttgtaccgtacattttttttcttacatgctgaaatggaagaaattaaagaacataaagtataaagtatggtcatgaaaattgtaagaggaatttccgggtaaaagtccaaaaccgaaagaaaaaataggtcaagccataacatgtatatgctgtcccaccacagtttagtctctgcagactttttgtcaagccgcgtgggtcccacttctggcggacccaccacactaatgtcgtaataatgtggagagtcgcaattacaagtccattttctttcaagatttcttagagacttttgtgccccctaggcctccacgaccaagtcataacccaaactcaaatatttaataaaaataaatccatcaattagcatagttatgaaaccaaccattccttataaataccctcacaacacatattcattttatatcaactaactttgtgcttcctccgcagaaaaataaaaaaagagtagctagcactagctagctaaacacagtacgagtagtgatcataggcaagcaaaagcatattcataatatggcaaccatggaagacatgaacaacatgagtggtgaaattacacttccaggcttccgattccacccaactgaagaagagcttcttgatttctaccttaaaaacatggttgttggcaagaaacttcgttacgatgtcattggtttcctcaacatctatcagcatgatccatgggacttgcctggtaatcagttaaaataaactatgtctctgttttatgatctgtgccacttaattgttatgacatgttatataatatatatgttcatagacattaatttgacaatgttatattataggtttggcaaaggttggggaaagagagtggtacttcttcgtgccaagggacaaaaagcacggaagcggaggaaggccaaaccgcacaactgaaaaagggttctggaaagccaccggttcagaccggaaaatagtgaccttatctgatccaaagcgcataattgggttaaggaagacactggttttctatcagggaagagctcctaggggatgcaagaccgattgggtcatgaatgagtaccgtttacctgacaattgcaaactacctaaggtatattattatttcaacattaactattaccatttttctttctttccttttaggcagcttgtgatttgaaaaaataacttagtttcctgccacgtgtttttcatatcacagattcatttccccccacctttcctttacgcgtcaatcaatttctcattcatattagattaattagaataaatttgttgacttttacttcaaagtcatgcaagtgatttaaacataatataacaatttaactctttaaattagtatttatatttatttataagtttaattgacataaaatgtccgagtagaatttctcctcctaaactaaaccgaaaaaatggtcagtacaaaaacttcaaaattataaataatgtgtttgacagaaagaagataaacaatattaaagaaaaaatttatattttttttttagactcacatcttttatcttttatttatatattttttattttcgtcttttgaatcaaacacacccttaattagaaattaaagatatacataacttttaacatcattattacttattatatactagtttgttattggaggacatcttaagtgtatattctatttttttttctttatttatttcgttacttttaacttcttgcaaaaaataccaggacttttcctaggtacaagtgtctcgttaagcatatggtatatctgacagggaaggaagtttcctagagacagaaaagaaaatgatagtacatagtagttactttctatacggctaggatgtgaatacatttagtgtgcgcccttttagtcttattttatgaacctccattcacaagaaagttagtaagaattatgcaacttaaagttgaagtagtagtacacattaaattacattgcaaattaatggtactaaaagtggctaataaattaagcatttgatgattatgatatttgggtacaggaaatcgtgttatgcaagatatatcgaaaggcaacttcgttgaaagtgctggagcaaagggcagcactagaggaagagagagagatgaagcaaatggttggttcccctgcttctccttcctccacggacaccatgtcctttagcagcccacaggaagagcaaaacatgcccttgccattgttgcaacatgttcttaagaaagagtctgaaactgaagacatggtagtgcctaaacaagaaaaaataaccaaccaattggtcttaaaagacaccaacaaaagcacttgtggcacatcactacaaatgccctttgggaaggagaagcttccagaccttcagcttcccatgctctcggattggacccaagataccttttgggctcagttgaatagtccatggctccaaaactttactcccaccaatattctaaacttctactgactccactctatatgcatcattactcaaataccatatcaactgcaacttaatcagttattacttatttattttggaatgtatatgcagtgaattagtaattaataacgttttttatattagctcaattaactagacatgttttcgtgcacatatatggtgtttcctatcaagttcagcctaactggaactttttgtcaacccttgaagatgtttcactcttaaaatgaatgttcaagaagtaaaattcatcagcagattcaattcggcagtttcactattcactttttggagacttgctttaataaccattgatctgctcgttttccagctcaagaacattttatattacgatttaaggatcacaattccttttatatttctttgcaataaagaaaacattgtttcctaaggtcattttggaacactacaattctagaatggaaatcattaatctgaaatgaaattagttaggcagaatttgcataacatgcagaactaaacttcaaaatccaaatagaggacgtgacccaaatcctattaatatatcaaagtagttttcaagaagaatggtataaaaaggagaattttagaattagacgaggacctgcctaatgcattaacttagacatccagttaggttaggttatgtccttgttttcaaaaaacttctatcagatcaattttggtaaaatgtaattagtgtgaatgaggagaagtaatttcaattattaaaatcaacgattaaaaatatttttaatcaggtatccttaacttaaaattatggaatagtctcttgaaatagtaaagacaaaaataataattgtaggagtacaataaatctcacaataaagagagagaaaagtgaaagaatagatagaattttaaaatgtaataaataatatggtagagaaaaaataaacacaaaataatattatataaattgttttaagaattattgtacatgtattatatctcattttaagaattgttttaagaattatatatatatatatatatatatgagatcaaaccttaatcacatacataagagattgattatttatccatcaaaccacaccatggtgattata

SEQ ID NO: 245 - DNA, 4050 bp, Glycine max
cttctggtcctacgttttctacacatgttgcgcaccgtcttcgtcgtcgtaagctcgttttctttcagctcttctaccacgccatttccgcgttcatgtctttcctgtggctggagttctcgcgatcctcttcaccacgctcccgttctccgttatgtttggttacaggttctggaccgcagtacgtggcggcgcaaggcgagtgcctgccactcgtgctcaactgccagattgcgctgctcgggtgcaacttggtttgccacgtggcggtgtcttgttgcatttttttacaggtgggtgtaacgggattggcgcgtgggtcgtcaattccgtgctcaactgtgctattttgttgccttttctaaatttttatcacgttgtgagaatggtagcattgctcgatcgttcctgctcctctgtcttacgcgctggaaaagaagcacatagtaataaattgaagtccaattaaaagcacagattcattgaaggttaagtcatgagtaccgttgccaatgatggcttgaaaggttttaggttctaaaccatcatgtatgagtaaaaatgtcttttgaaaagatctgacatggatacaaacacgaatttgagatatataatgttggatgaaaaaagctctaaacaaaacatacataaaatgcagttacacacgagatattgcatgatgggagcattttatattattcattttgagtgaattttttaaaattactaattataaatatttaaatatttataaaattaaaacaaaaaattagttaattatattttatatttataaaatcaaagataaatattaaagataaaccaaagaattaaatcacctctaaatttagttaagtatttaaatgaaatattagtaaaaaaaaaaactattaatacacagtaagtgcagtttttgaatgaaaaaaacaaagtaaaatatttatcttaaagaaaggcgtgaccggtccacggccacgtgggcgatcacagtgggcataaaagggtacgtggaataggaacaaaaatgggttggaaatggaaatggagagtgagagagataggtgtgatggattgtgtcggccatctttggatttatcttaaagaaagctcaacgtggcggccgtaccagacgacagactagaagccaagtggtaaactcattcccttcacttcaccctctcttttctcttctccaattatttatatttcctcacaaactaacaattttcgttttccaccctccatataaatataaaccaatacaacagcaacatgatggtttctgtgtcttgagggtgtaccaatatgaacagaatctcctctcgacacctttgctttgctgcagctcgcaactgcaacttcccacaaatataaatatatattacttcatggtcacacatagttaattttattaattactactaggtagctggtttttaataggtagtaggtaggtgtaatcgttgtcttcctgcagatatggaagaagcgggtttaggagattgttgttcctctaatacgactattacgaggaaaagcgagaagcgaaagcagcagcaccaacaacaagagaagccatacagaggaataaggatgaggaagtggggcaagtgggtggcggagattagagaacccaacaagaggtcgaggatctggttgggttcttacgccacccccgtcgccgccgcacgcgcctacgacaccgccgtcttccacctccgaggcccttccgctcgccttaacttccccgaattgctgtcccaggacgacgacgtttcgacccaacaacagggcaagatgtccgccgattcaattcgcaaaaaagcgacccaagtcggcgccagagtcgacgcgctccaaaccgcgcttcagcaatcctcgtcgacacactccattagttccagccacgtcagctatgagaaaccagacttgaacgagtatcccaaacctgaagattagtaatttccttcaaccttcaagattaatattgatccaccaatcatgggttctgatgtgacttatatatagggcttcaacttgccctcttcacctatgttaatttgaaaagaaaaaacttttatatttgtcatatgatttatctgagtaaatatttttttccagtttatttaattaatattagaaagtgtaggaagaaatagacacacctgatgagaattgagatgaggctaattaacttgttaatgaggtgagtaactcctttaactatatataaattaaggggtatatatattattagttgctcacctcatgttgttgctcatctcacgaagaaactcattttagattacttttttcctttcattatgtgtatgctggagcggtggactggtagctacatagattctcgctatgatggggcatatgatcatgaggtcttttctcaggtcggttgtgtgttgtaatttgtaacgagatatccgtaacacaataggatcaaattaaccgtgttttgttgtttcagattattttttctatgttcccgatgaattcaataatttgatatccatgtggtgaaaatgatttcatatatactttttttacttactgttggaaagttgtgtagtttctctgatcggcgccgcttaggcttgtgtgtgtgaactatattaattctaccatgtttatgttatcttgatgattgtcaaaatatgagcaaatgatgcagtgtgaaaaaaggccaagggtgaagagataaagataggaacagcagtggcccaacaaagccgcattaatatgaaacaaacaaacacataatgtttcacttgtcgaacagtgctaacaagtggatagagagataaggaagaattgagcaccaaaagcatcagttgcccatgacaccccacaaaacttctttttttctttttcttaaaagaatatgcgagataggcggagaacagggtggctctatctcaaagtgaggttgtcacttgtcacagtcatgggaaagttggagtttaggatcagttgcgtactttcgtttgatacacattgtaagagtagggcctcagccagctcttcatttttttttcctttagttttccacttagtattcttgtacaacacatttccttaaaaaaatgctgcatgccgtgaaaacatttcaacaaatagcgtttaaatgatgtgatcctatgcttttcgtctctctttttttcaatttataacttattttaatgtaaccactaatatatatacacatatgttctttcgttttgacacacaagaaatctcttatttcgtcttaaatttagaaattctttacttatttttatattttttaaaaatagaaaaaaaaaataaaccatacattatcaagtgaaaatgttcgtcaaacatttttagtttttcaggtgagaacattttccccttttagatgaaaccaaacagaacttaattgaattcgtgttgctatttttattttttattttttattttcgtcgagtgtgttaatgtttctcagttaacattgtgaatgatatatgcttgctagctctccaatgcaccataatcttaagtgttatatgtcaaatataatgttggagaaataatctcttcagcttggggtgggagatgtctcagtcaatgcgactatgtgcggcactgtccctttccaatcattgattccccttggtcaaacttcaaactccactgtgaatagcaaatacttgtactctcaaaagaaaaacaaacatgaatatgttctatttatataaatttattatatgttgcatgaataattttttaaaaatattctataaacgaaatgaatccgcttaaaagtaagtaatgaatcctaaatttatttagtacgttcttataaaatatgaattcaacaaagttaatcattgaattatgtaatattatttttctgaatctgtgtacatcaacatataaataaaatttatattttataaagtatactctatgttaaaattaataaagttaattagtgaaatattaaatagattttaaattatctgatcatttataccaatccaatgatatgattgatgaaattcaatgtccata

SEQ ID NO: 246 - DNA, 4204 bp, Glycine max
ttatcaatttcaattatataacaagttaaatattcatcttatgcaatataaaactaaaatattaatataataatttttttgctgtggtgttaattttcttttaaatatgctaaactataaaagatataaatagattatacactaacttcataaaaaaatattatattatcacccattataaatgattatacataataaattttttaagatttataatatccctatatataaacgcgtaaaaattataaattaatactccttacaaaggaccaactagatattgtaagaaagggagttcatttatacaataaggagggagtatataatatagaaggtgagacttacactctccttactttcacaaatagatatttttaatatatttttcttcttctcatcagatggacattttacatataactcttggaactagcaaaataataataatgtctatcactattattttaaaatataatcctattatctttaatctatcattttttatatctctaaatgtaatattttaataatttagtaaagaaatttattattaattaaaaaatcttacattataataaaaatgattaactgtaaatctaaagtgtaaattgtatattaaaaatatttatttattataatttttaattataataattccatattaaaaaatatttatcatgaaatttaatttcatataattcaatattcttatttgatgtaaataaatattatgtgagtgatgttaatgatttttttgaaaacttatgctactctattaattataaaataaataaatatttatgtcctaattttataaaaatatttacattattactccattagttgtcttatataataattttatcaaggtttaaaataattatttaaaaattatatctattacaatttgtaattgcaacaaacacttataaaagggccaacactacccaaccacactgcgtattgtataaatcaaattcttaaataaaagtgcccccattttcccaaaatcaccatctagagttttctcttttccactgaaaatcaaattagggtttggatttcggaattgccacagaatcatggccactctgaaagagcttcttcctcctgcaaaatcctcctccaccgcctactacgaccacaccaacgatccatggttcaagcagcgtttctcctcagaagaggaggagaaatccgccgccgccgccgccgccaagcagaagcccgttcccccctacctgaagcgcgccggcttcgttcctcggaaaatcgaggacttcggagacggcggcgccttccctgagatccacgttgcacagtatcctctcgacatgggaagagaaaagtccggcgccaaacctggatccaaaatcctccctgtcaccgtcgacgctaacggcaacgttgcctacgatgccatcgtgaggcaaaacgagaacgcaagaaaaattgtctacacgcagcagaaggatcttatccctaagtttctcaagaacgacgaagatgacgacgacgtcgtttccgacgacgaagcacagaaacagatcgaggaaacgatgcaggagaccaaggccgctttggagaaaatcgtgaacgttaggttaagcgctgcgcaaccgaagaatgttccgaagcagaactccgatgcgaagtatataaagtacaaaccctcgcagcaatccgatgcgttcaattcgggtgctaaggagagggttattaggatggttgagatgccggtggatccgcttgagcctccgaagttcaagcacaagcgtgttccaaaggcttcggggtctccgccggtgccggtgatgcactccccgccgaggccggtgacggtgaaggaccagcaggattggaagattcctccttgcatctcgaattggaagaatcctaagggttatactattcctcttgataagaggcttgctgctgatgggagaggccttcaggaggttcagattaatgacaatttcgcgaaattatcggaggcactgtatgtggcggagcagaaggcgagggaggctgttgcaatgaggtccaaggtgcagaaggagatgatgttgaaggagaaggagaggaaggagcaggaattgagggcattggcgcagaaggcacggtctgaaagaattggaggggagagaattggggttgtaccagccgcgccaccagctgtggcggtggatgaggacgatatgagagttgattatgagcatgagaaggagaatccgagggagagggatagggagaggagttttgtgaaggagagtagggaggagaaggaggagaggatgcagcgcgagaaaattcgtgaggagaggaggaaggagagggagagggagaggaggttggaggccaaggatgctgctatggggaagaggagtaagattacgcgggatagggatcgtgatattagtgaaaaggttgctcttggtatggcctctactaaaccagggactgaggttatgtatgatgagagactgtttaaccaggataagggaattgcgtctgggtttgccaccgatgatcagtacaatgtgtatgagcatgggctgtttactgcccagccaacgctgtccactttgtataggccaaagaagaatcttgatgatgagacttatggaggtgctgatgagcagttggagaagattatgaagactgataggtttaagcccgataaagggtttgctggggcttctgagagggctggtccgagggataggccggtcgagtttgagaatgaagaggctgatccgtttggtttggatcagttcttgactgaggtgaagaagggtaagaaggccatggagaaagtgggtggtggagggactatgagggcaagtgctggatcatctatgcgggatggtaacgagggaggttcaggtaggactcgcattggatttgaaagagggcattaggtagcacaatatttaatgttgcctgacctatttctagtgcgtagtgttgactgttgaatatccaccgtaatggcttaggttgctatgtctgaaaatgggtggttagaacaatgtgcttgtgttagcattttggtttttctccaaccccctgccctgccgccctgcttaggtggtgaaataaactgtttttgtacactatttcaattctgttaaaactgcttatggatgttacaacaatctctttccagtaaattatatattgaatgaaatgtattgtttaaagtagatccttgtctattgggggcgtatttgctctggttttggaagctttggacttgtggaagctttttctttccatctcacatgttgatatacaaagatttgaaactttcaatgtgtggtttccatgctttgattaattgattagagacagtatttactatttagcaactcatgataaccatgctttgaaaatatgtacatcttgttgtgatccagcatctgttaaggctgtcatagcacattaatgcattttgggatttgcatgcggcactcattacattgatagttagaacacaatatttctttcatggtttagtgatattcggtacttggtttagagctgaaattgctgttgtagacaactgcatttgttttctctggcagtcattatttccacttgttatttctgtttatattatagataaccaaaatatggttaaacaatacaccagcggtttgatctgctgtagcagtttgatgagacccttgagtccaataatttcttggacaaagaactattaccggttcagcaggtgaactatgaaactaagggggttaaaagtgtattctaggaggggaaaaggtgcgacacgtggcaaagaatccaggggtagagattagagaggattgtgttattaaaagtacgttcaattagtggttaggaaatttggcattaggcttgggcaaggaagcaagagaggattctgttatgatgagtgggcaaggtttggggaacccatgatggtgggggagagacgtttctgttttagagagattgaggagtcaaggggaggttgttaattagtcattaagaaattcggctttaggcttcggcaaggaaacagtgggttccttgagtatttcctattaatttcttttatggtattgatacttggatatctcatttcaccctatggtgagattaatacactgtttttcattttcattctgaagactggaggttattcatattactgtttggtggttgtttcattcttttc

SEQ ID NO: 247 - DNA, 2597 bp, Glycine max
gcccccttaattttttctaaattttaaattcaatgcttacaacaatttttttaatataatttttacttttcttcacctatatcttttataattttattcaccttctagttttttttatttttttcagctttataatgatatgttttcgtaaataagctcatgattacaaaaactcaaccagatccattgaaaaaccactaattttgtaattacatcatatagacgatagaactataactaaaaataataattttatattttgaacattaacttatgaatattttgtacataaattgataatatatttatcagatgaatattatacttttatgttggtccctctatcttttgaatcaggatttgttcctatcttaacctatttaacacctaaaagaagtaaaaagaatatataatgtgcataaagagagataaaagaaatctttaaaatgaaaaatatttatatattattactcttaataaaaattaaagttaaagaaatactcctcccaatgttgaaagtagagagcggtttccttatccaaaccaaagattaatgtagggagtagtagtaaatagaatccctaggcagttccgaaattgaattaagttcacgtggattagaatacacgcgtggtccaagattgtcttcttatacctaaaattcacacaacgcgtaacgacgaacattcagtgccacgtagacaaacaagtcacaatgggtctcttgtgttccccagggacgcgcctcgccaagtgagtgctgaccggagagtcaaaattcttcactcgcttcatcaaacactctctcacaacacagtacagtacggtcaacctcttacccgcaacatatatatatatatattggccgcaaactctcccacaacacagcaccaacaactcctattaagttttcagttctcacaaattaaaaaataaaaatattatatatacatatatatatatatatatattctcttcgagtccgtcgaaaaagaaaacaatggcgaaacccagcagcgaaaagccagaggagcatagcgattccaagtactacaaaggggtccgaaagagaaaatggggcaaatgggtatccgaaataagactacccaacagccgtcagaggatttggttgggatcctacgacacccccgagaaggccgcgcgtgccttcgacgcggcaatgttctgcttacgtggccgcaacgccaagtttaatttccccgacaacccacccgacatcgccggcggaacgtccatgacgccgtcgcagattcagatcgccgccgcacaattcgccaacgcggggccccacgagggacattcgggtcgacccgaacatcctcccatggaatctccatcgccttctgtttcggaagggaccatccaaacggacagtgacgtccccactcttaacggttcagtaacggatttgttcacgcccgttgggtcgagtggttacgcatccgattacgggattttcccgggctttgatgatttcagtggcgatttttatgtgccggaaatgccgaacgttaattatggagaagaaaacggggaagggttcatagttgatgaatctttcttgtggaatttttgaggggcaatcaaatccagtattcaccaccggccaaatgggttatggttcaggactacgagagaggcgtaaccaagtttaagaataaagtttttttatttatacatcaaatagtttattaaaattattattattttatttaaaatttatttttaaatataattttataatatttttttttaggtatattaatactaaaaaataaaatttaaaactatttttttagctaaagtccttacatggattgtttgatccttaagtcgatcctgtcattgttatggttgcagatagttttattgattctggaaccgtggtaatgatccgggtttgaattcgttaatttttggacgaccaaacctatatgattaatgagtttctatgatattgatatcgatgctactgtcaagattattgtaaaaaaaaaagttgtgattcattcaataatgaaaatattagttatcttgcaaataccagctttcttattttttttaactttgagttaagttatgttctacgacaagcaaaatttgccgtcaccttatagctagggtaacaaatttgaatgttagttttcaaattttttattacattccaactttatccttgtaactatttatattgaaatgaattgatctatttgtgtaagaaaaatgaaaatattagtttctccatcgtcaaatactaatttttattctatgatcacttttttaaatgaaagttgcattatttttatggcaaacatatcggttaaaaagtgttattaatctaatgtcacgttagagtatttttactttaaataggtatattgtcaaattcaaggtttaaattcaacttatttacctaacacaatatgtcttgggcttttttaaaagcttaatgtagcttaaaacactttaattattattaactaaattagtttttaaattaattaataacttttatttttaataaattacaatgctatataatacattagaaaagatgttattagtacttttttaga

SEQ ID NO: 248 - DNA, 3555 bp, Glycine max
aataatttctaacaaattttagtctgtcacaagtattagaaccagagtattagagaagataaattatactatgatccgttaattcgccaggtcacatcttttaagttgtccacgtcgttagtgagagtgtaactatcactcctctaccaatattaagccatggacacatcaattgcataattttttatattgtgttgaggcacacactatttgtcacatagtgttcgttttcatcagtatactaaacttttgtcttcactcattatagtttttaccaattcttgatgaatggagaaatagggtacatgctagtttctttaacataacataataattagttgagactagtagattttttttttttttttgaagcagactatagattgttctttagcctgaatacgagaaatgaattaaaattgaacaaacacggactcagtgaacatggtatcatatatatggcaatatatccggaggaagatgaagcattaattatatgtttatgcgcatcttggccttaaaccccatggggcaggggttgatactacctccctccgtttctttttcataagaaacatgttataggttattttataaataggaactggggtattaatttgcaggggaatatcattactgttttttttatttttattattattattaatattgcatttgaataccttcattgttgactggttctctcttcagtctttaccttttttccccctaagaatagccaactgagtagaaatagtgagcacactgattcaaagtaaggagagggcaggtataagatagctaaactggaaacaaagaaaaaaagcctagtcagacaaagtcaatcattcaaaagttacaacccatgtaatgtgtttttaaaaccacttgttttgtgctcacttttgacatcttcttctctaagctataagccatatacaccaaatattttttcacttgctctccatcttttttcagttcatcagtggccaggtaggccatgggaagggctccatgttgtgacaaatccaatgtgaaaagagggccttggtctcctgatgaagatgccaccctcaaaaactaccttgagaaacatggcacaggtggtaactggatagctctccccaaaaaagcaggtttaatttctttaatttattcatcactgcctctgctatctcttaattaataattattattttcgtagctagggaataaaataattcctctttttgtcatccatttggaggtttatcttttatatatatatatatatatatatatatatatatataaacctcggcaccttatgttggatattctacattagctaattatatatgggtaaaataatgtacgttaagtaagaagcaccctagtctacattggatgattggaaaaatgtgaagggagaagagaggggagagaggttataggttcaaatttctccctatttctaataagatcaacaaattaatatttgttgataaaaaaataaaatatgcaactctctcttcttgaattagctttgaaattgagttagacttcctcaaattgtaagactgtattatttgtgtgtatttttaggccttaagcgttgtgggaagagctgtcgtctaagatggctaaactatctcaggcctcatattaagcttggaggtttcactgaagaggaagacaaaattatctgcaccctttatgacaccatcggaagcaggcaagtccattatttttttttttttttatatatgaacgtattgaatatgtgaatatgcattgcttttgcattattattgctatatatctgagtaatgtgatggttttgccttcaggtggtcctttatagcagctcaacttcccgggagaacagacaatgatgtgaaaaatcactggaacaccaagctaaagaaaaagttcttggcaggaaacacaagtagtactgctgccacgacaagcaacaacaatgtcactttcagcaatactagttattctgatcaagttaagacccttgtcttggatcatcaaaaactgaactcagctgataattggtttgactactcctacaatgttttggaattggaacaaacaccaattccagttccttttccaatgtctcaggaattagaggcttttaattatactgctgggagtataagttgtagtgcaccaccaccctctaaggaagtttcaatgctttccaatgcagacaatcatacgctatggtttggttatgaccatgcaagtgaagatgatccaaatttgcttgagtttgtgcttgatgatgatctgctgaatcatggatttgtttctcaagacaaaagctgcagccaagttggtccaccatctggctaattaaccaagatcactcattctttctactcgtcaaaaacttgaaaaaaccaaggctacagaaaataaaggtaaaatggaatattgatcaagttattatagtatagtactagtgatgaattatatacctctaaatctaactggtgtttaaatttgtgattaaagtggttggttgaatgtggaattgtgtgagtttctgaattgttttcaaagttgaggattgtgatgttattagaagtatatatattagtcaaaagatatactgcatgtcttttctaatgttagaagagtctaaaaaatggaatgctttttaaggtacataaaatagtgtgggtctgtgggggcctcaaattcaaacaatgtgatcgcacgtggtcgacgaaaccaattttgttggcttctaagtggtcagtggtcacgaaacatgcgttggtccttaagcaatttccaaagcaggaaaaaaggggtgtctatctgacaataacaactacaatgcatgaacatgaccatgtgtctctattgcttcagaacttgcgtttgctccaaattgactgtcatttatttcaaggtgaaaaagaaagccaactttcttcacataagcttatatattgctgctttaaatcgattcacggcaaaaattgcttgtgcataataaacataaaaaggaaataataacttttccgtgaaccgtaacgaaaagagtatttttaaattagttaaagaaaataaagacaattttttttgttttctttttttacttagagaggagactaaagactagtgagagcaaactatgaaaatctttctattgtgaaggaacgcatcttttacaaaaaatagaaccaagttccaccaagaatagctaacacgagaagcagccacatggttggctaaagaatctgtacaaaagttatcttccctataaacattagaggaaagtaaagctatatgattctgtttacaaaaaaacaagcagttttgccacctacgaatattccatgggacaaatgatgagttcttcaaagcctgaatcacaagggtggaatcaaattccaaccaaatattgttctagccttttttaatagccaattccaaagctaaaataacaccaaacaattctacgtagagcgggtattgaactcccaaataagccaaaaaaacatcccaagaaagcaccattgtggttccacccgcttgatgatagaaggc

SEQ ID NO: 249 - DNA, 3970 bp, Glycine max
tctgcttttgcacatgaaatgggcacaattctaatcatttcccataatcatgactgcttttgttaatattcgacgcattatgagttcaacaataaacacactaagtggccctctctctctctctctctcctccaaattcaatatgactcagtcaccctaaaaataaatacaaaatatatatgcagacgcatataaagtcccttattatttgttcatctcgtcgtaacgtatgtttgataagaactttaagaaatttataagtttgtttttagtttttactaaattataaattaatttgatcaaaataaacttattagatacacaaatggaaaataagttaacctataataagtaactaacttttttttttctcctcaattttatttctattaatttatttttatttttttgtattctaacattcttacacgcatacaattcgttaaggttatattttttttaattatatcaagttttcaattatttgtgttttttcgaaattatattatccaattcgattctcctatatgattcccttgtacgacttgtatctagttatataattcctttttttttttatcaattcaattcccataaatgattcaattatagaaaaatagacactaaatgacatgtttattttcttttttattatcaaacttcaaattctactttttttttcttattttgtttaatgtaaaactatttatttggatgaattattacatttttattattttttcttaaaatatttttatcactaaaaaaagatgatacaaaatctaaattataagaaaaaacatttttactttaaaagtttgatttaaaaaaataaaatttaatttaattctactttcatttaaaaaaaattctgatgaaaattaatattagtttataaaaaattagactttaaacaataaaagtaaaataattgaatatgggagaagaaacaaaaaaaaatggagaggatggatccaaacccttaaatcacgtatctcccttgaaatgatgaattagagttcgattccaaactccattaattacgagtagaatgatacgtgtgtccccaaaacttgatttattgggaaatcaaaggaaaaaaaattgaagttgggcaggcaaacgaaatgagacaagttgaaaccctgagagagtcacacgtaaacatgcacgcgccatcaccccaacctctctctgttctcttcatcaaccctcactcatacattaccattagcaacggacagaagagagcaacaatgaacaaccctagttctccctctccctgcgcggccttcgcggacttctacgagcaatggttcgaggagcttcagtccctgatgcagcaactcaggggtgagggcagaaaagaggaggtgatggagaaggtgatgtggcaccaccagaactactacgtggccaagtcggcggcggcggagaaggacccactcaacgtgttcctatctccctgggccaccacgctggagcgctccctccactggatcacagggtggcgccccaccaccgcgtttcacctcatctacaccgagtcctcgctcatgtttgagtcccacatcatcgatattctccagggactccgcaccggcgacctcggcgatttgtcaccctcccagttccgccgcgtcagcgacatccaatgcgacactgtatgtaatattacttgcttactttttctttttttatcgctcatgtaagtgagtgaaactaacaaattttaaaatgtttaattcttttgggattatataaaactcatgtccacgtttttttaggtattattgctgccttttacattgaagaaacatataaatcgagcaaataaaatatttacttaaaatatttactaagttgtcattaattacatattagtgtaaaaaaaaaaaaaatactccttgccttatatatttaactggatttggaagttccttacatagttaattgagtttaacttgtttttaaagattttaaaataaagtattattttgatttataataatcaaaaataaaaatttctaaaaaaaagatgatattaaatgagattattctatttataatacttacagattatacctgatttttttttaattttaataatgattatattaaaaatataattaaaaatgagttttaattattttatcaaccatcgtaagtgtattttcttcagagaagaaagtgttcaattcagagaaaccaaatctaggtctaacaaaagagatttttcacttatggtgaaaaaaagttatgggcaaatcaataaatttgatattctaataaatgttcgtttattacgatcttaaataagatacaatatttttcttttgaaatattaacattaataaatattaatttggtaaaaaatgattcacgaagtggtcttttttttttttaatcgatttttttcaaggtgaaggaggagaatgcaataacggaggagctatcagagtggcaggacagtgtgagcgagatgatgggcccaggtgcgaacatcaacgacaagatcggacggctggtatgcatcataaagaaagcagatgatctacggctgagaaccttgcggagtgtggtggggctactgtcgccgcagcaggctattgagttcttgattgcatcggcggagttgctagttgggatacgcggttggggattgaatcatgaccgtccacgtggcagatgaaagtggaattgagtttaggccacaatttctctattttgattgaaattcattgtggccttaaaatgattgtgtattatttattactagttactagaactagaacagtccttgctgaacaaatatttctttttgctgattaaaaacaacagtccttcgctattaggctgcagcctaatccaaaacttttcttaatttaaattttaaagtttttttctatgttataatatcacatgcattattaaaaaccaataataattattgactgtttgagttttttagtccttgcaattgattcaaattctgatataaatataaaataaataaataatataagagaaagatatattcattttatatatcacggaatacattactaaaaatgtttctttatcatttaaaaaaaaatgttcagtatttcggaaaagggattattttgtatgagctcacggagtatattattacgaaaaactaggtagtaagagttttcaagctcaggtcaagaacgtaatacgtgtctctacgacaaagttcatgacatgcaaggtgacacctagcacaaacgtggcttctgggcactgcaaattatttattctcccctcagacataaaaaaaaacgataaaagaaaaacattaattagttgaattttgaactacagtaaaaatcaatgaaaataattttggtatactgcattgatgcaggagcagaagttttctctaaaaatgaattgcgatgacttttcttgcgtcttttaaaatttgtatgtataaaataaaaaagtgacgactaaatagagatatatagtgttgattatactatgtttaaataatggaattatgaggataattaaatcaattctcttgtgcggactagagagaaaataaattattagaatagtgagttagattttatttataatattaaaacgaagacaagtaaaagctgtattttcaatgatattaatttgacgcctttcctccttaaatttaactatgatctgccattacattgcatatacaaataaacataattactttattgattcaagggatgcacaagcacaatttcttatagatgtagttacgtatttctgataactttaatacatttcagtaatctaattataaaattgtataggtatcgtcgtcaacctgattaaaaatttagggaagttatgggaatttattaattcttttataacgtacctactggctagagacttcgttaaaaactcttataatatagtagaatataataatatttgaattagtaattgagaa

SEQ ID NO: 250 - DNA, 4068 bp, Glycine max
tgatttgagtcatttttaaattattagatattgattaatcaaatagttgtgtttttttaatacaaaaacaaaaaccaaactctttgggagagcactcaaaagggttaacacaactaagagaactagagtactgtatgtaaagagaaatctcccacttcctccctatatactagactccttcttacagtgaataattcatataaacaattaattttctcatcaaaggttactcattttaccattatttatgtcaaatcgtatatagcgagagtttaattttgatacataatccgaataaaaatttactctatctattaattaatgctcatgatataattttttaaagtaattataatacaagtcaatgagttcaataataatacaattaattttttaagagaataataatacagttcatgaataaatcagagtgctttatttatttattgtggtgtgtatatgtgtactaacacacttctaaagacagtattgttttagtagtatttaaaagaaattaaatgtcagttaaaataactcatccgtcaaatgttgtttttcagacttaactttcctcagatatgaagagtgcagaaggcgacaaccctccaaggtgagaaacagtagagagcatggaactatctatttattttaagttgacttggccacttaggcgaagatgaacgaagaaattgggtagatgaaaagaacaatgtcacgtaagcagtcttctatgtttcttggtttctctttctcttaagggaccaaagcgatcacgcggagtgaggtttgaaaattcatttgaagccttcaaattaaatgatgcctcgcaggatcatggaccctatcatttgaagtggactcggtcagctttcttattcatcacactattcactcatcaaataccggtcttagctgaaaaactcgcacatctcagtcaaacttggactttcaaccctccaacactaactcctcatttgccaccctttaaatacatggccttcattcagcaaaaaacacaccttacctttcactagcctaattcgctctcttctaccacaaaccactcaatcctaagaaatccatttgaaatttcaagtctcgttctggctaagtccatgttcattgtttactatacctcaccactccaaggttctcgtaattttcttcagcagaaaacgaaactattgcttccagagaagagcatcatctacgaccattttggcaatattataaaacaagacaaaaatggagagtgacttgagctgggagcggaacacactcatcaatgagctaattcaggggatggaggtagcaaggaagttgaaggctgacttgaagttgccgtattcagttgacacaagagatctgcttctgcagaggatattatcttcttacgaaaaggctctactgattctaagatgcagcaatgcatcaacttccgagttgcagggcatgaatcaagcaacaccaactttgctacccgagtccccattatctgtccatggaagtcctctgcgcgaggacgttcatggggccatcaaggatcaccataattcaaagaaaaggtgaatattactgaacagacttggtagctgtttcctggcacataaacatcagctatgtctggtaactggttatactatagctcctaacttgtatttgtgtttcttttttaattgctttcagaaagataacgcccaaatggatggatcgtgtaagagtgagctgtgagagtggtcttgaaggaccacatgaagatggttacaactggagaaaatatggtcagaaagacatccttggagccaaatatcccaggtgagagaacttccctcggtcctgctttaaaaagaattacaagttttcttaaggataaaattgccttcaccttggccagcttctaattaacgactcattgtgacaatttgcagaagttactataggtgcaccttccgcagcactcagggctgttgggcaacaaagcaagtgcagagatcagatgaagatcccacaatgtttgacataacttacagaggaaatcatacctgttctcagggaaacaatgccgttctgccacccaagtcaccagaaaaacatgagaaaccagcacacagtcataacattgacattcaccatgcacaggcatcacaagaaagccttgcaaagttcagaagtatcttgtctgtcaacacagataatctggacaatggagatatggcatatgctttcactttcccttccacttcatttggatgcatgaaacaagacaaccacagcttgattcctttggccctggagaatgactccttcttaagcgacctataccaaacacacctgttatccccaacaacaccagaatcaaattatttcccatctccaactttccagatgaatgagtttgatgggatctacaacaggtcacattcgaaatccgatatcaatgagatcatttccaccaacacatcagcaaccaattctccaattcctgatttcaatttctcacttgatccggtggaaattgatccaaatttccctttcaataccccaggatttttgtgctgattgcactataaatggaatactataagaatgtagtcttcataaaacgggacaatttcagacagcagtagaattgtagaataaagaatgagcaactgcagcacttatgaacgtccttgtagtcaatatcagaattgcaattttggctccgtgttagcaattagcagtatgcactttcaaataaaatagtttctgcaaatttgcattggtacaacctacaagacacgtctttagtagaagggcattaaagggagcagataaaaaattacacatcaaaattggatacgctggccaaaactctgtaatttcattccaattgatgacttagttacacaaatatccatatttatttacagcagccccagagcctgaaatgatacaaatatataatgatagtgacaaagtgacaatagaatggcttgtaacatgaaatctgcatcctaggattcttgttgttgttgttctactcgtccaagactgagttaggagtggaagcattttgatcttgtgaattttgagcttttctgagagcctctctgagacccaagacaatgaacaagttagtgagagtgaggagtgactcagccccaccacgttggacaaagaagtcccataatgcaccttcgctgtgtaacataaaaacaaaaatcaaacatccatccatcttctttaaatttatcatcaaattaaacatcattttcaacaaattaactcaccataaattccagctggtactgtttaattgtacaaggttcaaaacacagaaaatcagcaacgtttataagttaaagcaagtgataaaaataaatggagcaaagagatagagagagtgactagtggctccaacaaaggcaaccaaaaggagaagccgaagatggtgaggtttggagcagtcttggacttggtaatgaagtacaagaatcccatgtagggaaacaaggaaaaggcgaagagctgaggagcgatgctctgggagtcaatgatgatgcagaaatcttgttgttggagggacacgaggggaaggcttgttcactcaaactcaactctcttctattctatctcatcatctcttgcttctgcttgatgcatgcaacattgggaccgttcaacttccaaacgggctggcccatttactaactgctctattgggctatccttcatttgaaaaaggttacaattatttagaatgctggttgattagattacatgctgcaaatctaaaatattataattactaatttgcttacaatataaatattgatttagaaagttgcttaaatataaattaatcaaataaatcattattttagttttttaattaaataaaatgtaaactaacggggcaatcaaaatactactccaaatccggaaactacattaaatattggcagttttcgagttttgtttgacttgttgtaaattaactcacatttgaatatttgattcaacctacaacaagatggaccggactcccttgattggcacaccttatctttcttcataaaattagca

SEQ ID NO: 251 - DNA, 7877 bp, Glycine max
taaaataatgtaaattgttaataaatttaatattattaattatattaatcaactttttaaaggaagtaaattaattaaaagaatcttatatttagagacagaagaattaattgttattttttaatgtaatattaattatttttttaactttatgtctcttataatatttttaattttttaatttataaatgaattaacgatgatataaaagatttatttaataaaataataatattattatttatattttttctgcgtaaaataataattatttgagggcgagggagtataaaatatttgtatagcttctctttgtctctctaatataaatgtcattaaatggaagtggggcggtaaaactattgagcttataaaataaaataaaaaagattttgttgttgaatattgagccagtggacattgacaagacgttgttcacggcgcggtacttgcccatatgtgctactgtaaagctatgtgtgatactgtacggttcctcatacccccagtaagtacttctctctcagtaatccattccattctctatgttcgtcctatctatctcaattcttaattacatttttctttctttcaactaaacaaatattttttttctttaataaacacacatcatcaaaccatcaaaattagattttgtcatcatcgtttcaatttttgttttttccttgtatttttacgcgcaaaagttatatcaatagccgtagccaactaaaaaaagagaataaatagccgcgtgctaatatttgtatttggtagttgagggagattttttcttccttttcaatttttctgtaatctaaatctgaatttaattccctccaaaacgtggaagccatactggattttgccattcagcagcttccacatggcgtgatgccattgctccacgcgtcagtcgttgatggagccggcggcatcttatcccctgtatcctagacgcagacaatcattacctcctttcatatttaaaaactttagccgaggcatctaattccaactccagcggttttttccactttcatttgcgtctttctttctttctctgccacctcatctcaccggaaacacaacacactcacatccattactccatctccctcctaactaacaaacataataacttctccaatattccaataatcctttccccttcatttcacacttgacatactatttcttttattcatttattgtttttttttcactttctaatcccaacataaacataaccgtttttgtttttatctcacgccacgccctggttccagtagtgatcgccacaccgcgcttagtatgaagcttcacctaatccgcgccaccgtcatccgccgccacgttgaccacgttgaagaaccgctttcgccgcagtgatgtaaatatattctttctcttcttcttcatgcatcctttctgctgcgtgtccgccatttccgaccaggcctcgcctgtaaaaccctcgttcgcggacttcgccatgccgcctctccccgccgccgccgccgccaccaccgtgagatccgattcggctccgcgtcacagccacaagcacagccacagccacagcgggagccagcgggagcagccggtggtggacgtgaagatcaacgacctcgtcgggaacggaatctccggaatactgtacaagtgggtgaattacgggaaaggatggcgaccgcgatggttcgtgctccaagacggcgttctctcctactacaagattcacggacctgataagatcgtcgtgaatccagaaaccgagaaaggctccatggtcatcggcgaagaatccatgcgcaggatcactcgcaaccgcaattcctatccctctcaacacatacgcaagccgtttggggaaatccatctcaaggcacgacctagctctactcctggcaacttaatttcaattattaggtattttcattcggcgtgatttgtttgtgctgttctgtgattgtttaggtttcgacgattcgcgagagcaaatcggacgagaagcggttttcggtgttcacggggacgaagaggctccaccttcgggcggagacgcgggaggatcgggtggcgtggatggaggcgttgcaggcggtgaaggacatgttcccgcggatgtcgaacagcgagttgatggctccggtggacaatgtaactgtttcgacggagaagctgagagttcggctcatggaagagggagtgagcgaggcggcgattcaggacagtgagcaaatcatgaggactgagtttgcggcgctgcaaagccagcttgtgctgcttaagcagaagcattcagccctcattgacaccttgcgtcaattagaggtacgtctactcaaaactcaaaactagaaaacttcgtttaagagcaagtgtaattgtaagttgaatcgcaatcacttcagaatgggaactatacttactaatataagatgcttcatggtagtatagtttggtactatattgtctccaaaatacaaatatttaacctgtgaagtaggttatggtttgctggtagtttatacgaaagtcgcttcctagctctctctctttttttttttctctttgttcttgtgacttttaccgaccttgtcaataccagaatactggcataaattatagcttaaacttatcacgtatctttcaattgaaagctccttgaataaatatgtagtatgtctcttctcttgtgttcatttatcttgccaaaagttttctaccagtgaaaaggggggcaggcaattgactgttgctaaatgctgttccaaattttgagtgttctgaactgactaggtacatgtgaatagattaaggtttatatgttgccctcctttgtgtcctgcaagttgccttcgtgaatgaaaaagcagtttctttaaccttggaagacaatattgtgcagacccggaatgatgttgcctcatgggtgaaggagctgggtaggttcttcataggatgactatttttattaacatattttcgaattaaatctattaaatcctgcattataagggtttgcggtcattaatttaaatccattgaattattcaatgtttctttgtcattgtttccacattgtttaacaaaatgatttcatttgctattttttacatggatagtttattgtttattttattttaatgttgttttcttttacttttttaacatattgaccaaggataaatcttttttattttcatgtgtattaaaaaacatttatctatgttatattgtagacagaaaaggttgatctggaggatacagtagttgatgagagccaaagacagtggaatggtgaagaggcttcctcaagattagcacaagaaaaatttagtggtaagacttgaaacatttctgcatcagcagcaaggattatttagttgtgtcattgttttggtgaagcattttcttgaaacttgaattatttaggttccactatttctatctctgatatcccaattataacctaacagtgccttttatacattttattttgttttcctgtttttaattcagaaggaactgcaagtgaatctgaagatgacaatgagagaaatgatgctgcagaggaagaaacagatgatgatgacaatgccttttttgatactcgtgatattctgtcatccagttcttttaaaagtaatgggtctgattaccgagtatcatccttctcttcagatgatgaaggattctatgcatttgaatcagaggatgacatagatccttcgattagatatgttggaaccaattaccctcatgttaagcggcgtaagaaattgccagaccctgtagaaaaagagaaaggtgtcagtctttggtcaatgattaaggataatatagggaaggatctaacaaaagtttgccttcctgtttattttaatgagcctctttcctccctgcaaaaatgttttgaagaaatggagtattcatatcttctggaccaagcatatgaatgggggaaaagggtaagtctggatttggctgacaggtctctatttctgcaatattaagcaaatctgagtgcttaaatagaattgtttcatttgaaataagaaaatctgtatcttgactttgattttcttgctgttagctatttcaatgcagtattgggtgcattcttctcatttttaactaattggagatgtcatgcagggtaatagcctcatgaggattctctacgttgcggcttttgctatatctggctatgcttcaactgaaggaagagtttgcaaaccatttaatccattacttggggaaacatatgaagctcactatcccgataaaggccttcgttttttctcagagaaggtataatctaacttgacacagtgaagtgattaaaatattacatattttcaactctaccaaagtatattttcctttctgattgcactccaatttacatatttgtgaaatgggtcaggcaattggtatctttagaaaatctacaactgtgtggacattttttttggtcttaaatcagagttttttgaatgattcatttgatggaaattatatgtactaaccacatttgaattccttaaaaccacttgcttttgattcaacaaaacaatttgcagatttgtcttgtatttccttccctagaggtttcttgggttttaattgatcattcattcaccagtaaagaaacagttttccccaatacagaggatcataatttcagaaactacaccatttatttttggaataagaggtgtaatgtgagtgcattagttctggagaaacctatgaacacaaaacaagacaatttggattttggtgtgaacaaaaaggatatgatttggcttttttattttatgtcgcctattagaaattattaatgtttttgcttcccctcaggtcagtcatcacccaatgattgtcgcatgtcactgtgagggtacaggttggaaattttggggtgatagcaacctaaagagcaaattctgggggcgatcaattcaactggaccctgttggtactttgactttggaatttgatgacggggaggttttccagtggagcaaggtaattattatctgcttcaactgctacaatatcctgctttggttctaatttctaaatggacttgttctttcaggttactacatcaatatacaatctcatattgggaaagctatattgtgatcactatggtacaatgcgtatacagggaaaccaagagtactcgtgtaaactgaaattcaaggaacaatctataattgatagaaatcctcaccaggtgctttatatctgttgcatggattctattttttcacatttaatatattgttatttcctttagctctggtattaaattgtccttcttctttggtttgtataagacttaattgtcttactgtatagactcaatatgcatacttttgcactcaatagtgccacctttgctagtaaatggtcttttaatttaccatcttactatattatgatatatgaacttttgttgcagacgtttgtctcttaatgttgtttgcctgcatttctaggttcatggtatcattcaagatagtaatggaaaaactgtatcaactttgtttggaaaatgggatgaaagcatgcattatgttaatggagactacactgggaaagggaaaggtcatgaatctttgtcagatgcccgtttgctctggaagcgaagcagggctcccaagtttcccactagatataacttcacccgctttgccatcacattaaatgaacttacccctggattgaaggtgtgttttgttaaccaacactctcttttgttgattgtaatattcactgcatgcttcttgtgcttgattgttaaccaatattcactgcatgcaatttgtgcttgattgtgcatgctttaactggagttcacttgcaataacaaggggacactaattttttctcgacaaagatgaaatatatccaaaagaaggaacaaaatagtcctatcatcttactgtgcacattggggtgtgtgtttgctgtgtttctgccattttgttagacattgattgttgatttaatttgtgattttaaataggagaagttgccacctacagattcgaggttaagacccgaccaaaggtatttggaaaatggagagtatgacatggccaatgcagaaaagttacggttagagcagcggcagcgccaggtgcctgttacattttatgttctgtaatttttggttttatggtttcacttggcgcttggcacttaaaagttttttggtgcttcgaaacaccttttatctatgaaagggttaagagtagattgtgttcagctgagtaggctctattttcgaattctcttgattgattagttataccgtcgagcaaatattaaattagttaagtaaaatgttcataaggtgcctttgtggataggaaattggagtaaccgatatgttacaggattttatgtcatatatactcatccttattttagtagtttccgattgtgatgattgatctaacatttgtttgaatgtggttcaggctcggaagatgcaggagagtggttggaaaccacggtggtttgcaaaggataaagctagcgggtcataccgctatctaggagggtattgggaggccagacagcgaggaaactgggactcctgccctgacatctttggccaaattccttcggttcacatttctgacgaaggtcaaattacattttagttcttctaaaattttttcctcccaattttttttactgatgggtgtttctaatgactgcgatctcgctgttatgatacacccatgaaattcatgtacccaatcagatgaaaatatgagcgagtaataatgtaattctttttcttttcattgcaagtctatttatagaatccttattacttgcgagacacgtaatctttactgttgttatcatattatcatagaggcaggaatgcactaagtaatcaatattttgacagcacgtacgaagcaaaagcaagttccccgagtccctattgcacaccacaaatgacctaagcattacatggatctatctttttcgacaagcatttaataatgacttaatgcttggcataatcgcgtaagcaggtgtctgaggaaccgaaaatatgatttttcttatgtggcctatctccattcctggcttccatccttgatgtgccaaagcaaccataactccattttcaaatcccacatttttgtcattcatccgaattcctataaactttttgaactctttgggcgtctgattcatcttcagaagttgtatgatgttttatcctaaaaacatatgtacgacgcttaagccatcacctcggttcctgcctaatgtttctcaatgaatagatacggtgagatgatacacctgggaaataataaaaataattaatgttgctccatagaccatggaacacaaattttagaaacacattaataatgtttaacgatttaaaattaattttatcagaatgaatactatcaaattttaaaatgaaaatgatccctgaaattcttaaattgtgagcaaaactcctcttttcttttgtttttgatagaagtgagtaactgcatttaaagaacaagcaataatgcacgatacctaattttttgaaaggatatgaagatgaatggaaacagtgccacactttacagatgggacctgttgtccggtgacaccatcaacttagacaaattttatggacagcttttattggacagtttttaatctgataagttagattgcgacctgtgctgaaattgttcattacaaatttataatgctgatggtctatgtagttgtcagagtttatgtcccagtcaatttagaatttacactgacaagactaaatcccactgcttacaaaatcgtatatcattcaaactaaa

SEQ ID NO: 252 - DNA, 4141 bp, Glycine max
acaccatcacgcacacaatcgtcttgttttatggattcacttatcctttgtgatgtatatactggcgccaattattctctcctaaagcatatctgatttgtgatgagggtgacactcatatatcccggctacttaaagttttttttcaccagaaggaattacgatgcttgataaagatgactttggaattttatttggaaataggaaaagagctaaaaagcactcaatgtgccttttttatttgtaacgtgatttgattgacttgttcaaggaagccacatcttcatttaagaaatgttaattaccaatccattagtctaagagtttaacaattatgtttttgataatttaaaattattttatattgtcattataaattattgtttaaatttttttaagataattattttaaatgttaattaatttatcatatataataaattataattaaatatctgtgtaaaaaaaattaccctcggtgtataattatttttgtcttaatttaaacatttattcaatctattattagttaaaatttatcaaaaataataaattttaactaaatataaagtgtgtatcagaaaaaaatttattgagtaatatgaaactatgtgatctcaattaactttatatgatatataattgaagttattattttttctgataaattaaaaaaattgtatgcatatcatatataaatttttgttgttgctaacaatcttctcgttttattattaaatagaatatattatttgttagctaggggcgtgagttcactttcttctaaaagggtgtggtggtgggctatcttttcccttccatgcaaggacaaattctttgataaatgtgagagagagaaagacagaaatcagagagagagagagaggttggtgcgtggtttgtaaggtgcttgcttgtagcattttgctgattttaatttacagtgagcacaggaaagaagagggtaaagaagacagaagtgttaacagaaaacacaaacatgttcgatggagtaccagaccagttccaccaattcataactccaaggacctcacaacctcttcacttacctttccctctccatgcttcaggaacccccaataccaccttcccttccaattttgatccttataacaacccttctcatcaattgccactccaacccaacaacctcttgcacccattacaccacaaagatgaagagaaggaagaaaacacaaccaccgtcccaatgaacttcgaaatccaaagagatcaaaggcaacaacttcctgaactaattgatccctggactaccgatgaagtgcttaccctcttgaggatcagatctagcatggaaagttggttcccagaactcacttgggaacatgtctcaaggtaattaacttaattcaatcttaattttttttactgttattgcgtgcccttaactttttttttcttttttttctaaacaacgatcatccaaaaaaatcaacgcaataaattcgttatcagaaaaacaattatgagctgcactttgtgttgtgtttgatcagtgtggttgcatcgtatgcttaaaaacttcatgtggtagacaaacgcacacgtgcacctacactttagctaacacactgacaccttgacacacacacacacacacaaaaacacacaacccaagaggaaggaagggaagtattacgtgttgaagacaaaggtgctaatagatgctttcattccatggttgtgtttttttttattttggatttatataatttatggtttgggcgcaggaaactagcagagcttggatataagaggagtgcagagaagtgcaaggagaagtttgaagaagagagtagatatttcaacaacaacatcaattacgccaagaataacaataatagtaccagcaattatcggtttcttagtgagcttgaacaactttatcaccaacaagggagtagtggtgatcatcttgaaaagatgactcagccaccactgcagaaacaaggcaggatggaccaccatgcattagaattggaagaggaagaaggggattcgagaaacgttattgttgacgcatcggtgacaaaaatacaaagcgacgaggcacttgcggtggaaaagatcacaaaggaccgcaagaggaagaggtctgataggtttgagatgttcaagggtttttgcgagagcattgtgcacaagatgatgactcagcaagaagagatgcacaacaagctccttgaggacatgatgaagagagatgaagagaagttcaccagagaggaagcttggaagaagcaagagatggagaagatgaacaaggagcttgagatgatggcacgtgagcaggctgttgcaggtgatagacaagccaaaattatccaaatcctgaacaaattctcagccactacttcgtcccctgcaagccacaccctcaagaaggtaaacacccacatttcacaaaaccctaatccttcacaaacagaaaaccctactttaagtgttgcacaagacacactgattccttctacttcttctacttcaactccagctccagctcctccccagaaccctagttcttgttctctaaatagccagaataataatcatattaataataatattccagtagagaaaaattcgattttgaataaggggtcctcatcaaatgagaaagacgatgttgggagaaggtggccaaaggatgaagtgttggcactcataaacctgaggtgcaccagtgtgaacaacaacaacaacaatgaggagaaggaagggaacaacaaggtccctctgtgggagagaatctcacaagggatgtcggagttgagatacaagaggagtgcaaagaggtgcaaagagaagtgggagaacataaacaagtacttcaggaaaaccaaggatattactaagaagaggtcccttgactcaagaacttgtccctactttcatcagttgagcagtctctacaatcaaggaaaactcgttctacaatctgaaagccacttgaataatactccacctgatcagaatcccgagcaagtaaaaccagatcaaacaacacaagctcatgagtcttcttcgcaggtggggtctggtagtggtttcagtgttcagcaacagcaggtaccttctttggattttgatcagttttaattcattgattcacataataagaagtgtaccacctcttttttgtatttttgttttttggttgatgctggctatctttaatatagcatataaattgattgtgtatatttgaaagaacttagaatttggcgagcaccgacagctatagctagtttgaggaatgagaactattaatatttctattccggtgtaagtgttattttcatatatattctattttattttattttagtgagagaatcaattgatggtttcatatttgttttaatggggaagacattgaccctgtgaaaaaaataaaggaagaggaagcaaaacattctttgggacattcttcacttttttagctagggacttgaacaacaactaataaaagctaaggttaaaaaaacatcagtctttttcgtccaagtatacaaagtttaggtactcaaagctaaagtccagccaagataagtttttatctctaataatgaagacaatttaaattttactattctggataactttatcaccccccagtaataatgaattttgtactcaagtgctaggtgccacatccttaaaattttaaagaaatgagaaaaacgagtttgttttgtatgaatttattaatacaatatgaccaattgtgctttaattaataacttaccataagttttcttgcaataaagtttcagaaataaatgtatttacacaacaaaattatacacattttaaaaaaaaataccagagaaataagtaagaaataaattatataatgtaatatatatagagagttatataaatttttaaataattttattgtgtaaataaaatattttatatgttcatatgcatgttgacgtgcataaataatgtttgttactagaaagtagactttaagtagtaatatcatggactctagaaatttaaatataatattctaacgataagttgtgttctcatataatttaatttacataaaactaaatcatttagatttttcaaaaaattgaaggaa

SEQ ID NO: 253 - DNA, 3540 bp, Glycine max
aataatataacaaaaggtacataagacacgaatctctgcatggtgacatgcataaaacacacatttagcggtggactttgtttgtcactaaacgtttctagttttctaaatttttgaagcttttaattaatgcactactatatgttgagttgacattttatttacagagaaagattatgtatctatagcataaaataattttaatttattattcaattaagaattattattttaaaaaatattttaagagtgatttatgattgaataatattataaaattattttatattatcaaataaattattattaaaaaatttatatatttaaaatattaatgtatatatttttatattagttttttttaatcatccatggtataaaataaacattagtaaaaaaatataaaataattcatcaaatgatttttttaaagaaaaaaaattattatacattgacagtgcaaaaatttttatataatcatatgatgataattcattatgtataataaatttattaatttttaaaataattattttaaaacaataatttataattaaatgattatataaaattattttatattattagtatataaatattaatttttttaaatactacttattttagactattttgctcgagtaagatattactggtataaaacaatacaccgaattattattttatactaacatttatttattaaaatttacaaagaatcaaatcatgcgaatccctaggaaaaacaaaccgacagacagggcgccccattccaaaaccaatgtcgtaagcagtgacttaaacccacttcgtgtgggttctcgacacgcacgcaccccaattccacgtccgatacgtgtccatcctcgtcaccaccccacccaaactctacccctttttcttttcacacctcctataaaaccccccctctctctccagtcccaactttctaacgcccccaccaccacacaatttcatttcatttttccttttcacttcactttcccccaattttctttctcaacaatggccgcagcaacacaactccacttaccccctggattccgattccaccccaccgatgaagaactcgtcgttcactatctctgccgcaaatgcgcttcgcaagaaatcgcagttccaataatcgccgaaatcgatctctacaagtacgacccatgggaccttccaggtaaattaacaatacacaaacaaggttttaaatatcggtcatgatcgtgttacgatttaatcgcttttgtttgtatcgaaacaaattatgaacaaatacaatcgatgccgtctcaattatgattcagatgctggtcgtggacacattttttaaaatcttgcacaaattattctcataattctgaaataaatgataataacttttttttattgataaataatttaatatattctggtgttgtgttatgtaggaatggctttgtacggagagaaagagtggtattttttcacgccgagggaccgcaagtacccgaacggttcgcggccgaaccggtccgcggggaccggatactggaaggcaaccggagcggataaaccggttggcaaaccgaaacctgttgggatcaagaaagcattggttttttacgccggaaaagcgcccaagggagtgaaaactaactggatcatgcacgagtatcgtctcgccgacgtggatcgttcggttcgcaaaaagaacagcttaagggtatataccagtatgcgcccttttttctcttcactatcgaggacataatagacatttcaacgcacatttacctttcgaaaatcaccgttttaccctttaatgaatcacacctggccccacccccccttggcaagcgcgcagagaagcttcggtttacgataagttgataaggaccactcacagaaaaaagaaaaggaaaataattacaataataaatgttttcgccaaccaattattactttcctacatatggaaattattcgttctttcttatctctattgaagttagggatatgagaaattgaaaattaaaaaaatgtttgcacatgattgttgtttctgattatgcagctggatgactgggtgctgtgtcgaatttacaacaagaaaggtgcaattgagaagcagcaaccagcaccgccaccaccgagtggtgtccacaaaattgaatgttacgaaatggaagacgtgaagccggagtatacggcggcggattgcctgtacttcgaggcttccgactcggtgccgcggctgcacacgacggagtcgagctgttcggagcaggtggtgtcggcggagtttgcgagcgaggtgcagagcgagcggaagaggcagggcaacagcgagttttcgtataattacatggatgccactctcgggaataatcagatgtcgccgctccaggatatcttcatgtacctctccaggcccttctgaaatcaacacgcacgagacggcacgacgtcgttctttgctttgtgtgtgcatgatgcatttttgacgtgcctgctgcattgcatggaagcacgagactgagtgaatgtccgtgagtgtgtccgtgctggtgcgcgtagatgattattattataaaaaaacaaaaaaacaaaaaagagaagcattcatatatgaacatgatgaatccaactgtttacatgatctagtcgcaattaatagtttgatattaaataaattgtgtggaaacaaaatatttatcttatttgtctttaaggttttgatgaagactgttttttgacaaaaatgacttcgtactactattatgtttaaaaaaatatcaacatgaattatgagtaatattaatattgaatcattgagtatattaatgtgtgtctatacaatgcttaatcttcacacgtgcttattgtacatattgccagtttatataagaaagatgcttctagtaactgctgggattgcaataatttcaactgatacttcaaccattttcaagctataaaggtgtctaaattattaagtcatttttatttaacttttatagttaaaactaatattactaggaaggatcatggagacattaagagaactaaagatgaaacctgcaatcacaaataatctaaaaccatatagttttttggactagaaaaaatgatgtattaactttttgcatctcataatttacagcaatgcctttggccagatagcattccatgtctcgaatcatctcttataaaaactaaccatacagaacctacactagtcaaatttatttctgtaattagaaggtttaaatattttttttacaataatgcttttttttaggaattttataattcttaattaattaattaatatgggctacatattatattataatatttatattaattatttatagttagttgagtttaatataaagtgatctaatttgataagcctattagactgtcaatggaaaaattgatatgggcttaatgagtgaaaatgacctattaggggataatgagaaccctaataggttaaaacctaaggcataattatggttttcaatacaccaaatcaagtaa

SEQ ID NO: 254 - DNA, 3729 bp, Glycine max
taatatttatatactaatgatataaaatagttttacattttatattattttattatatattatttttagcataatttgtatatttctaaataattctcaataatagtattttttttcactattgaagtttgataatgcaacatataattggttatatttataaaaatatagacaatattatatgctactttgcaatcttattattattattaatatctttttatattattttgataactcttcaattatattaataatgtaattgttgatctcaccaataattagttaattctttttctcgaattaaaatcatgattattcaactgctttaaatatacgtgaataagctttaattcaataactgtggtctatataaaaaagagttcacttttttatagatatttttgttgttgaaaattttggataagtgatatatgaatttttgattaaattatttattggcttaagtagacattgactaattagtactccttcttacattgaattttttccttctcaattactagtatttttctattatcaatttatcaaataatttattaaattaaaatattaaaaaatttaattcacctaaagatatagtggcaagaaccttattacatctttcccttaaaaaaatcattacatataatcaattaaataaatatctatcgatagtataaagaattcttatactactatttaattgtaagttttatatatattaagtttgtaattttatattaattatttttaaaattatgctaataatattttgtattaaaattgataaaaaataatttttaatcaattaaatattttgactcagtagtaataagtattttttttttgttgaaaaaaccggactgcggcaagggcataatagtaacactgcttactcccccttctccatttaccgacatccgagagccttcatttgcattcaaccaaaacggacgcttttgttattcttcgtgtcttgttgtgtttttcatctgagatgtgtggaggagctatcatctctgatttcattccggcggcggcgatcgccgggtctcgccgcctgaccgccgattacctgtggccggatttgaagaagcggaagtctgacttggacgttgacttcgaggctgatttcagggattttaaagacgattctgatatcgacgacgacgacgacgatcaccaagtcaagccctttgctttcgccgcctcttctcgtcgtaacttttctctctcatttctttcttatgcaaaattatcactctttactctctttttgattttggaacattaaaaaaaaaaattcatgctatggaagtcaattttatttatcaccatgtgctttgattttcgtttacggagttgatcactgggatttcccccctcttagatctgcaataaactcttttattcggtacagatctcggcttgttttctggaatgatttgtttttcaggtagataaaaaatgagggaatactttttttttttaaaggagtgtgttgttatccattattcatacacgagttcactttcggctgattttaattcaaggatgactttgtggattctgttgaaatgatagatgcttaagaatgatgctgtttgtgtttcttaataacccgctactgcagcttctctttctcagtatagaggtacttggatggcaaccttttgttcattgctaaaataaactttacttgtttgttgtccatgttaggattctttctgattcccttttaaccttgttgagacttctaatatcctcaggtttttttggggggagaattggggggaaaaatggttatatgaatccgtgtttgtgccttgatcttatttttattatctttgtttaatggttctgagtttctgttcttaccgtgatttttacacttttccaattatatgaaagtgtctacggcagcgaaatctgtggcattccaaggtcgggctgagatatctgcaaatagaaagaggaagaatcagtataggggaatccgtcaacgcccttggggaaaatgggcagctgagattcgggatccaagaaagggggttcgtgtctggcttggaaccttcaacactgctgaagaagctgcaagagcttatgatgctgaagcacggaggattcgtggcaagaaagccaaggtgaattttcctgaggcaccaggtacttcttctgtaaaacgttccaaggtaaatccacaggaaaatcttaagactgttcagcccaatctgggtcacaagttcagtgctggcaacaatcacatggatctggtggaacagaaacccctagttagccagtatgctaacatggcttccttccctggcagtggaaatgggctaagatcccttccttcgtctgatgatgcaaccctttacttcagttcagatcaagggagtaattcatttgattatgctcctgagatctcatccatgctttctgctcctttggattgtgaatctcattttgtgcaaaatgccaaccagcagcagcctaactctcagaatgtggtatctattgaagatgattctgcaaagacactctctgaggagcttgtggatattgaatctgagttgaagttctttcagatgccttatcttgaagggagctggggcgatacttcattggaatccttgctatctggtgacacaactcaggatggtggaaacctcatgaacctttggtgctttgatgacattccttccatggctggtggagttttctgaaccgctttttctttggtctccctgtgtgtaaataaagctacaagttgtttttctctgtttttgatttttgttgcatttgttgttctcttgttggacacatccccccatgtgtctgaaaaaaaaaatgtaatttccatttttgttgctttctggaatggttgtcatccgtgttgaagatggagttaaaacaattaactcgctcaagcatctcttgtatctaaagtatggggctatatagttatttaggtgtcctttgccttgtcaaaggccttagttttggggaaatctcgattgttgttcgagggtgattatatatgatctgtgaaacaatcttggctgctgataatttttaactgggttgtttctctatggttatactcctatgacaaaatttgaatgatgaaacaaaatgtagctgtgtgggagcatcagctggtgacacggggcatgggtcttgaatcttgattcaagatagtggcttcggtatacgttaaaaacacattgaccattgacctaaaaaataaaaaagcagctttgagaaacaaacttctattttcagaagcttaccatgggattagggagatttggagacgcagaaaaaaattgcacagaggattttattattcatgtgcctcatttgatccaagaatatcaacacaataataattggaaaagctctcatgtcaggttatcaacgccagtagaagaaactcggctgctgagagtgctacacacgatctattaatattgtaattcgtaattgtaaatgatgaataagagaaaaaaatgttcatctaacgtaacactcattttattttgagttgataaaagtgtgaaattattttacatcagtgcttaacttttttttcttttaattaattaatttcaaaatttcagaattaatcaacttttatttataagaagttataggattttataattgaaaagctttaggtaagtaagaagttaaaacttagccttaaatcctatatacgggtaa

SEQ ID NO: 255 - DNA, 5866 bp, Glycine max
tatatttaataatcaatcaattattacttatgttaatcgttgttagtttttgaaaaaaattgttcatgatttttatagttacaaaaatcttaccttttatttcttacatttaaaaataatctattttaatccatttacaaatactttcaagtttgttttggtcttggagattcgagtaaaagcctaaaaggatacagtactacatagcggaaaagaagaaagccacactctgagcgaaattaaatcatgacacacaacacccggtcacccggtcacccggtaccgctaataaattttagtagttgtttgttatctggtccatttcgattgggtgaatcaaaacaacgatatatttcagttgacctccaatgatacgtgtcactcgtcatcaatcgatcaatgtccaattataaatcaagatcaacgttgcctgatttgattaaataattcatgaataattttattgagagacaaaatctaaaattagagattaaataagagattaaatttacaattttacttataaaaaaatgtaaagttcatttaataatcaagataaaaaaatatgagatagtaaagtaagagtagaaaagaagattagcataataaattccctaaatatttatggatccttaaaattttaataaatattaactttctgattattcctaaaaaacatattttatttttaattttaacttgtgtcgtaatcatagcataattaaaaaaaaaaaaacatttgtaaatagtctcgtcgcctactacccattctcaggtacccacgttctcaatatcactaacttaagttcattatctctacctacttatttaaagacactacatcagtgaacccagggcagttgaggtatttaattaaaatgtatgataatattggtggtaagttaacgtttaactgtttaaggaacagattctagaatttcttaattaagtgtaactgtatattcggcatataaatatgccatgagggcaagcctctccgagtacatcttaatttctccctagctttgcttatagttcctgtattaatttttctctccctgagattaccaagctctgcaactttgcttctcaacatggagtatcgtctcctacccatttttactttactcaatgttagcttcagcatccaaacaactgtagcatgcatgcttattaatactttatttaaagttatggtttccttttaatataaaagctcgatttctatttagaacgggaattttcttactatagccacaagagttataatatatgggatttattttttataagtggtaaagcattttctggtattaattaattttatcacacacacacacacacacacacatatatatatatatatatatatatatatatatatatatataatatgatcaattacgacaaattaatatttagcactgtatcttatatatatatatatatatatatatatatatatattaagagactgtatcacatattattatcatgaaaagaataaggccaggtgctgcataatctgtttggaatgtattaaatgtttaattacgagatgtttttgtatttgacttgacttgcagcttgcactggtggcaatccatgctgctttacctcctgaagtttactggaagtcggtgcttcctactacgccaatgccaaaagccatcactgatatcctttaccccggtcagtgcaccatagtataaattttaaactaaggtcgatcatatgcaatgttacacatacaatatttgaaaaataaattagagaatcttgataagaaattaatactcaaggaaccactttaattatttgaaaatgaaaataatactttttatgttatcaatatattactattttttaatgcttccgatttttaaatttattaataagtgctattatcatagtgaattttttctattaagcatatacactagtatataataagtgtagctcaattaataacaaacgttgaagttgtcaaaaatgatctagtaaaacatgatctaggtttgatttttataaaatatattcttggaaaaaattaaaaaaaaatatataaaatatttagtcatatagccgacttaaagagctcgaacttacagaaatatattaaaattttagcatggaaaacctaacgtctactaattaattaattaatgacggtggtgaaaaaaaactatttttgtatatagttactggtagtagcctttttctattataactttctcttatagctattagatcccgaatattaattgtaattctggttagttacatgcatataaaaaccccatgcatgcataatcgtatgtgttgaatgacagtttccattctcgaattggatatctcgatctgcagtctgcacgatctctctcttcgaggtccgtgtttatattcttttaagaaagaaaaatgtttatgtaaaaaaaatagaaaaatgtgaacatatgttgattatgttctttttgattaatcaagagtgtaattgaatttgaatattttgactataagtctcaaatataaattttgtaggtaaaaattataattaaaaagagaaattttactaaaacttattagttgtatttttaaccgacaaaaagattagtcgttgaacaaactatgatactatataattataatatgataactattttttttttaaatgagtcgtacttatagttctcgcttatatttaaatgagtcttacttttaatttttaaatttcgaacaaattttgattaatagtagaaaatatattaggatgagtatatgctattgttaaatctcttatataggaaaatattatacatatatccttttttctttttctttttttatctttctcttggttttttttttattgtatcatttgtcacatctatctatttatcttttttattaattttttaaaaaatttagacaattgaacattaattgtataaaatgttttttaatcgatctttttaacatataaaaaattaaaacttcaaatgtatttttactattatatatatataagatataatatatatgtattataattttttaagaggcatgtatcagagttgcttctttagaaaaaaagaaattaccttaaaaggataatttagacaaatatataaaaaaagtaaaaagttgcttattttattaaaaaatattttttttataaaaacaatcttaagtaaacaagcccaatagtaaaatattatatatatttaacgaaaagttaacaaattttgacagaaaattaaaaactggagaaaagtattagacactctaatgtatcagggagtgaagtgcaaataatgtaagagaaataacaatgtaatatttgtatatctctatggagaggagtgtaattttccgtatattaatggtaaaaaaaatgttttaaagtatttaaaatatatatttgttattgtaactctcctctcaacttgcatgtttgtcccaccggcacgacttatatgtacaacttcactatcttcacatgaacagctaaatcgacacattaataatcggacctagtcaccatgctctcattttcaaatgtgcaataatatagtattgtgaaaaagaaaggtacagtcatacatgacgtctttagtaggggataaaaaaaataaacggtgaatgaagatatttaaaaactagttgtgtatacacgaaagtaacagggcattattatgactcgttgcagatagaatatctagtttggcttatgatgaagataagctaagttaatttataattttaatttgcagattgggtggaagagaaaagtacctcagtgaatgttggaggcaagggcgtaaacgtgcatgcaggaaaaggaggaggtggcaccaatgtcaacgttggtggaaaaggatcaggcggaggcgtgaacgtgcatgcaggtcacaagggaaagccagtgcatgtttctgttggctcaaagtctccattcaattacatctacgcttcaacggagactcaattacacgatgaccccaacgtcgcactcttcttcttggaaaaggacttgcatcccggaacaaagttgaacttgcacttcaccaccagttccaatattcaagccacattcttgccacgccaagttgcggattctatacccttttcatccagcaaggtggaggttgtattcaacaagttttccgtaaaacccgggtcagaggaggcccagatcatgaagaatactctcagtgagtgtgaagagggtggcatcaaaggagaggaaaagtactgtgccacttcgcttgaatccatgattgatttcagcacttccaagcttggaaaaaatgttgaggttgtgtccacggaagtagtggaggacaaggaaacgggattgcagaaatacaccgtagcaccgggagtgaacaagttatcaggggacaaggctgttgtgtgccacaagcagaactacccttatgctgttttttactgtcacaaaactgagaccacaagagcttactctgtgcctttggagggtgctaatggggttagggttaaagcggtagcagtgtgccacactcacacgtcggaatggaaccctaaacatttggcctttcaagtgctcaaagttaagccaggaaccgttcctgtctgccacttcctacctgaggatcatgttgtttgggttcccaagtagatttgctttaatttcaagtccttctttcctgttcttgaataacttagcttcagtagcactacagaactctatatatatgcatgtatttgcactgtgtagttctctagatattaataattttttgctgtttatttagatgctatgcgtggcttcttatgtataaactatgatgcattatatgacttattgtgtgtttgaatagtaaatcgttgtagatagtacgtaatgcggcgtcctcgttctcttattttgatgagagaaattgttgttatgttaatcacgttatgtgttcaaatttgccgtgattatatatatatttgctctggatcccggataccacacatcgacctgttgaaatcccgggtgaagaattttgttattgtggtggtgaaggaaacctacttgaagtttcatacatgaaaatttgtagattatctttccaatcaaaatggcttaaattttacaataaacagatgcctaaatcataagaattaagtggcatgttaaacctatgtcgcagaaaacagatttctctaacccagaaacttgaccaagtttattctcttttgttcttgatcaaaattaaacaattttttaatgtgcttccataatagagacaacccgaatctctcaaccaattgtacaaaatgtgaaggcaaacgagagattgaaaaaattggattttatacaatctgcaacatgaaaatatttgatcatcacacatttttcaacgaaattatttgattttttgcaattgatcaaaactcataagataaaaaattgtcttaatcaattttaaccttatttgcaaaattattttaatttttataattttgaaatattatcaaggctattaaaaactatcacttgttaattgaacaaatagaaaaacattctagactataagtattattatgtgacaatttttaattactattatattaaaactatcaatagcgttaattctacaagatagagtgaccaattattgaaccaaatgtaaatgataaatgactaaataattttttaaaagacaaaatgattaaattagctagatctaaacaaaaatataaaaaattaaaagtgtaatttagtcagagattttgaaatacttactttgaattcttcattagtttgcttccctaataaattaaactctaaaacaagtcagcaaaattttacgggtaattatggtccttctcagtg

SEQ ID NO: 256 - DNA, 3559 bp, Glycine max
ttatttaaaatacttaatttggtctccaaatttttaaagctcaaatttaattctctaatttttacaaatacctcactaggtcccttcgattcaatagagattgaatgcgttgagttgatgtacacttggcatcctctggttattcgcaatgttaacgaccataaacatcacataaaaatgaaaaaataaaataaaatgatacacaaacccatcaaacttttttttgtttttttttttttggagcaaattaaaaactactggatcggtaatgattaaacaagtaaaactataaaaaaaaacttgtaacagccataattatttttttagctcctcgctagaattccagagtattttaagctatgagattaaaataattatgaatacttttgtcccaaattttaaaaacaaaaaagataaaatatgaaataagataattaatataacaaatgaaaaatcaagtatacaaagacattatataaagtatttataaaaatagcatagttcaaattaaaaactttttttaatcaaaaaccttttttcccgtagcactaaattcttccatatcatcaactatttcaagaaacgaagatttaataaatgttaccaatttattttattattttaaaataataatgttatattagtaaataaaaggagttaataaaattaaggtaaaaatatatttataatactgttttttgaggtatatatttataatactaatatattctttttattgtaaatttcttaactagtatttttactttggattcttttgctgcaaaaataccaaacccttaataatataatattgaactttatgggattcgaggaagccacctaccaccacctccaccaaacaccagtcccccgaagttgaccaagcgaatccccacaactaagtgcaagacaaaaaaaaactccaaattccaacttctcttctctactaatccctggatgctctctctataaaggccaaactcacaaaccataccctaacaaattgaccttattttgcaacaaaattcaattttgagcactaaccagcaccacttccaatggcttcaaatcatgaagaagtgatacttttgggcaagtgggccagcccatttagcaacagagtagaccttgctctcaagctcaagggagttccctacaaatactccgaggaagatcttgctaacaagagtgctgatcttctcaggtacaaccccgtgcacaagaaggttccggttttggtccacaatgggaacccattacccgagtcacttatcattgttgaatacatcgatgagacatggaaaaataatcccctcttgcctcgagacccttatgagagagccctggctcgtttctggtctaagaccttagatgacaaggttagcaatcttgctttgttcttttcttccactattttgattattgcatatttggattagtgtttttttttttttcacggaatgtttgaattagtgttgaatcatgtaaaattcaaatatttagtagattttaggtaaatatttgtatatttagtttaaaattgattgttagttgaattaatttaagtagtctttgtggtggataagaaattttatattgagttttattcttaacttgttaaaaaataaaagatctacccataaatcatttaacatcaaaaccaattgtataaattaatttataaggctctatctaaatcattgaggtatcaattcaatccaaatttttatttcttaaaaaggacgtccagtcaaacaactttctaaaagagaaaatttaagtaaagattttggaagtgtttttagtattgtattttaaataaataaaaattagttattctccgataatttaaataataaaaatttatgtgaaagattaatataggtcattagataaagctttaaatttgactagatgataacattaaaaacactaaaatgcatgtaagtttagtacttttgaagagctaaaagtatctctttttagcaacaaagatctgtaaaataaagttcttagaggacacttttttaaagagaagtgaaagagaaaagtatggctaaagcaagcactactatagggtagagattttaagttgtcttttttggttttagatcttgcctgctatatggaatgcttgctggagtgatgagaatggacgtgagaaagcagtggaggaagccttggaagcattgaaaatcctgcaggaagcactgaaagacaagaaattttttggaggagagagcataggattggtagacattgctgccaatttcattgggtattgggttgccatattgcaagagattgcagggttggagttgctcaccattgagaaatttcccaagttatataaatggagtcaagagtttatcaatcaccctgtgatcaaggagggcctgcctcctagagatgaattgtttgctttcttccaagcttctgctaaaaagtagagtcgttttagaggtaggattcctaataagttagcatgattttgttgggaaataatgataatcttgttgtgagtaaaagattgttctgttttaaatttaattgactgtggtattggttgagggtattggctattttaattttaactataaaaaactggtgttctgtgttgttgcctgatttctcaactaaattgaaccaagctaagaagttgcccgaatgggtgtgcaatataggattttggtgcaagaggaatgagtgttgtgcttaaacctttcttcattattaatgttcctatctcccccatctctggtgtctggtgggaataagacacaagtcaaacatcattagatattgtatctgctctttcatgatcatttatgattgttcacaaaaggtttctccaaggatgagaaaacactaggtgaatacattgtccactaagttcccaatacattctcttaatagacaataatttcatgatttgatgtgaactttgtgtagtcttttacagcttaattatgtttttttagtcccattgagtctattttttatattccctcaaataaaaatttatattttttagtccttcaaattaaagagttttttagtcctcctcttgaacaaaaatttgcatcttttagtccttctaattctggcaaagcaactaaaaagaatttttttttttttaaatctgacggactaaaaaaatacaaatttttatttataggactacaaaaatagaccctctaatttaaggaattaaaatcataattaaacctcttttaatatgagtatgggactatgggttgcatgatgtaagcattcatatgatttgagctcaatcccaaggttacctgggtggtgcatagggatggcgagtctggatatgtattataatatttgtatatgctctcataccctcacatgtagccacttgtggaagtatgagtgtattggtgaaaatctcatcggtatatattttctcggattttccaacacaactttaattcttatttccctactcgttaggtacttgtatgctcaaacacactctctacctgcatttttccaattataaagttaataaattaataaaaaatattaatta

SEQ ID NO: 257 - DNA, 3685 bp, Glycine max
ttattttctctcatttttcttatgtctttttgagtttttatagtactactcgtactacgatatagattgaaatataagtaagataatcaaatattgtgctaattaaatttttttcacatattaattaaaatgataattacttttttctttaaagttctctgctcacatattaattgttactactttatatatttttttacttgagtgttaaaattcgagggatgtctctttttctacaacaacattgactcaataaatcatcattcttctttgtggtatcatgtagtgtttaattggaatttggaactaatgaagaatcactcatttataaccaaaacacaaaaacccttaacattcaattaatcattattgtaatagcccaaaaatgctgaataataaaccgtccatcccatttacttataattaggtaatttttcattttaatacaaagtctactattataaataaggaggtatatttataaaatatgtttgcataggagtgaaatccaatataatcgacattcaattcaattaaactcaaagcttcaacatattttctttaaaatttttggatttagaaaagtctaagaaacaaacgataatgtattatataagaagcaactataggggtattgaattttagttggagataagaaggaggaaggggagagtatcacgacagtcaaagaatggatgggtgatctgagccaaagtgtctcacctcacgtgatcggtatgccttctgtcctcacacgtgtccttttattatttgccttaatactgccacatttcatatgtgtctcctatctacacacatcacgtcctcaaaggctaacccaaaataatattaaaaaagaaaatcacacccaggaattaaatagcatttaaaccgggcgttgtaaattgtagtaatgtaacttatagatccgttggatcctataaaataggtttcaggtaacaaaagacacagtaactttttttatccctttcttccttccatttcagctctcttaccttctgcaattctttgctagagagcacagagttgttagttagttcatccttggcaacagttattattttttttttttcggtcatagaaactgttaaaaattaaatcctctttatttattttatccttgtaactttagcagaaacaaaaagaaaataacttttccttcgtcccacaggctccatgtgctctggtgttggtgctatacaaaatttcttgttgctccacgctgcaagaagtgaacgcacactgttattctctccttttaaacgtaactttcgttgaaccttctcgttctttaatgtagtaactttagaagcagtatttagcccgctttgttttctctctgacgtgttcactcctttctcttctcttctttatttatattctcccaccccttccccccgcccgtgtccactctccattctccaaggaatctctctctctctctctctttctttccctttttcactttctcattcattcttattagtatttctatttcacttcaccaacccactccaccgtttcccctttccttccatgctattatggcttcatcttccatcaaacacactcaccaccttaaccgcacaaaactcttcatgaaagaagaaacccttttgaaaaagaagcatcactatcccaaaatcatacgaatacgtgtcaccgacgccgacgctaccgactcctccagcgacgacgacgagccctccatgtcctccacgcgccgcagagtaaaaaacttcgtcaacgaaattaccatccaaggcggcggcggtggtggtggcgacgttaacgttgtttctaagaaaagaagattcaagtccggtgccggagctccgttatgtcggcggaagacgggggcgaagaagttccggggagtgaggcagcggccatgggggaagtgggcggcggagataagagacccgtcgcgccgcgtccggctgtggctgggaacctacgacaccgccgaggaagctgccattgtgtacgacaacgcggccattcagctgcgtggcgccgacgcgctcaccaatttcataacgccgccgccggagaacagaaaaaccggttactgctccggcgaggagtctcgcaacaacgacgacttgcgttcccccacttcggttcttgggcgctgttcggtgtccgaggaagctgtaactgcaaacgacgtatttggaggctctagtgagtgcgagtattcatgcgtttcggagtcagtgtttcctattcctaacgaggtggtgtttgactttgaaagcacgttagatatgtttgatgaagggattaataatgttgtggcagagactagtatattcttggcggaggatttagatttgggttttacgagttggcatagagagtgtgataatttccaagacattgggggggatttgtttgtttgggatcctcttgtcgctctttgattgagacacagacaccattctctcgtctttgtaattctattgccaacgaaaatgggttgctatcagttttgtttcttttgggggtttaggcaaaaaccttgtgtctaaggagaggttttctaattttttattctagcagtatatgtttattaaccactagttgtaaaaccgtgcttcccacggtgttgccgtctttttgtttcttatataaaattatgtctcataagttacccttttatttatttatttttcccagcaaatggtatagtttaccttcttggttcacgagttttgtatgtaaaaaacaaacaggcattgctcatagatatttagaaacgttcgtcccatatattaatattcacaaccatctagtggtctagagcgtttaattttgtctttacctgactagaagtgttaatttaatgggattgtttatttaaattcaaacttaatcggattaaaacttaatagtcacatttacgatttatttattttattaaaattgttagaaatttgagatatttgaatcggttacctttttcattcttttactcttctccaattagttttaataccagtaaattataatattatataaaatcttattaaataagaagttagtattaatatatacatttttttatctataagaacgggacaaccatcaacacccgtacatccatcaacgacatattagtattacaatttgtacggacacagttctaccgaagtatatgtttttgtcactgtgttagtataagaaatgatttttttttatctgattttgaaagattttttattttctaaaacttatttgttctttaagtatattggaaactatttgtctcctaaacacattttttttttttaagtttgtctcgagaataattgagtaagacacttaaaaaagatagaaaaaggatgagaaaatatttctcaattgatttttttttttggattttaaaactagataaatttctgatgataaattaaccatttatatataggaataaacttgtagtatcctttgagtttatagcatatcttattatttttttacccttggtattttaattaagattcgtttctatcctctcacaaattaaaccgaaaactctagcccctactatatatctctcgagtcacatatctttccttgtagactgtagcatccaaccaccaccctcatcgtcgttagtctcttggccactgcttttagtggtatcggccttaatgtg

SEQ ID NO: 258 - DNA, 6280 bp, Glycine max
tgccataataaagtgctacgtgtttggtttgtcagccattctcgacttctggtggtcttagttgttggtatctttggttctcagcatggacaatgtgagtgattacttgattatgatattttagtgttatgctatcgtacaaaaccatgagtttgtggcttccaagttttctcctcgttcaatgattgttgaaactacacatcttttttctatatatcatttcttaaattccattttatacttacagcctctgcctttgttctcatttataagaaaaaaactcaatttcatacttattaaaaaaattagttaattttataataaaattgtgttaattttaataaaaaaatatttttttcctaaattatcctttattgatatttgttatcaaacataaatcccatattaaataaaatttattttaaaggtagtctcattaaatgagacacaagtaattaaattttgtttatattaaaaaaatcattgaatttttccttcttataaatgaaaacagagggtatatgtatttagtaaaaggtcaattgatcatgttagataacactctgctaatgtctgcagtacaatgtccgaatgtgataacctcaaaaaaataaaatagttattttagattttgaaggaggaaaatcaaagacaaaaaatattttataagaaccaaaaccaaaatttgttcatttataaggaccaaaaataataatttaaattttagagaataaaaaaaaataaggactaaaatcaaaacatgctcattttatatgaaataaaaatatatttaagtttatatatatatatatatatatatatatatatatatatatatatatatatatatatatatattactattcttatttttaacaaatgagaattcttttttagataactaataaagtttattggagaaattgaatttgagagataatttgaaatcctcttatgtatataaatgagaaacttcccggaaggttcccatgattatctacatttcaacttccatacaagtttataaatatacatgacgttccttgttaatttcatgaagaaaataatacgtgcatacatagctatctatttatctatagcaagtgcgtcaagagacacgtggtaccctagctagagtgccattctgtggtttctttctttctttctttctgcatcacatcacaatttgcattgcctcgtgtcctttttcttctttgctctccaaaaatctcacacacacaggtatctagcaaatgggttctcaccaacaagaaccatggctattggagaatgggaaaccaagggttttgaccaaggagaccaggcatggccgttctgcacacagaatgtcctccacctctttgcgcaagaaatctagccgaactcttgtctcaaaggttccatgtgccactctcagaaaccttctttcaaatttgcaagaggttattcttggcaccaagctctccattctcatccctgctattccagctgccatcgttgctgagtgctttggctttggaagagtgagtccctctcatcatcactccacttaattagttgttattgttgttgcacatgtttgcattgttttctcagtttcaactaactcaatcattcatcaactcaactaattcaatcattcaaagtaattattaaaatgtgataaataacttcatcttttaaatataagatcagtaggttaaatttttaaatggtatatgaactgataaaaaaaaaattattagaaaaaatcagtttcttaaatgaatttttttgatacttctacagatttgtctttaatttttatttgagaatgtcatgagtttacactcaagaaaaatcgttttcgtgtaattattacaaattaaaattctaaagaattttttgtacatgtatagctactctcgtaatgggagtctcttgcatgaggttgcccttgaactaattcaactcccacacttattcacattcaatgagttgtagttggatggtccaaaccttgatcttcctcgaccgtgacaatcttttatctgtgaaagtgaaagcatgcatcaaaaaaaaaaatcatggtcaactaaattaactaatattgagtttaaaactaacttggccatattttgaatacggcacttaaattaattatgatagagtagggcggttcttttttttatcatttaaagtttgtttcgaactaagatggttacgtgaaagttgaaaattctataaaatttatgaaatgtttttcgttaaaaacaaattttaattgttgcagaatgatttttctattgctcatttgccgcaattacgccacgattattgacgatcctctctcttttttttttaatattattattattattatatcaaacagccttggatttttatattaagcttacttggacttacaccacttgctgaacgtgtgagcttcattacagagtaaggaacctcgatgaacttgttgcaccctttcttttctttggatgatttgttatacaacaagcttttgtttctgggttgattgctgatactttttctattttctctgttggtgattgtcccttcaaatgtcgcagacaagttgccttttacactggtcccacaggtatgaatctaaaccgaaaaagtgtatcaattttggagaatttatcaccatgaaaatttcctttaatagctaatattttaatttggaacataatataattaatatttgattgttgtatcaattttgaagtttataaacatcaagagttaggactattttcacattattgcaccaatcgaatgttctagactattggttttcgagacaaaccatgtgctacttgtgatcttggaaatagtaaaatcaaagggttaaaactagaataagaaagcatgctgctacaaactgctgagtaaaattgattatggcataactgaagctaattaaatgttttactttttctcaattacagttggaggacttctgaatgctacatgtgggaatgttactgagctcataatagcaatatttgcccttagcagtaacaaaattgccgtggtcaagtattctctgttgggttctattctttcaaaccttcttctggttcttgggacctctctattatgtggtggcattgcaaacgttggagtggaacaaaaatatgatagagtaaggccctaaaaatcccttcacagtttcatctaataatgtgtgcacatttttcataattagtcctttatgtttttttttaataatggaacaatgatgactaattttaagcattgaatctgcagagacaagcagatgtgaactcacttatgctgttgttgggattgttgtgctacttgcttccaatgctgttcaaatacagtggtgcctcagctgctctcactgtagacccttcactacacttgtcaagagcttctagcattgtgatgttgattgcatatgttgtctacattgtctttcaactgtggacacacagggagttatttgaagaagaagatgtaaggtttcttgaattatgaaaatggttaattaagttggttagcaattaatctaatccttgccaatatcgtagaagtaattaattaattaattaacaccatgaattgttcaggacggtaaagatggcgaggatggttcagaagaacaagctgtgattggattatggagtggcattgcttggttggttggaatgactgtattcattgctgtgttgtctgaatatgtggtggatacaattgaggtaataattgacataaaatgtttttttttcttcaaaaaatgaagtccatttagttttgactataataaatattgatggtaattaatattgtcaaacataacaggatgcatcagattcatggggtttgtctgtgagcttcctaagcataatcttgctaccgatagttggcaatgcagctgaacatgcaggagcaattatatttgccttcaagaacaagctggtgagaactgagagagtgataatattatcatattggccaagcaataaatttatttaattaaaatgttaatttagttaaactaaagtaattccttgaacacaggacatctcattgggtgttgcattaggttcagcaactcagattgccatgtttgtggtaagatacacacacctctaatatgtaaatggacactttcataatttcatttataagttactttttttccccttcttttaatgaaagcttatgcaattacacaatataggtcccattatgtgtaatcgttgcttggataatgggtatcaatatggacatgaacttcaacctcttagagacaggttcccttgctttggcaattatagtcacaggcttcactttacaggtatatatttaattaacaattttaactggaaaaaaaaaaaacccatatttttttacctcattttcattcaatctctgaataatggaatattatgagaattgacaaaaccacccttaattattcataggatggaacttctcactacatgaaaggccttgttctcctgctgtgctacattgttattggggcatgcttcttcgtacaaagaacaccctttaatagtaagtaaaatatgtcaaatttccaatggttacataaatataatagtcaaaatccgtgatgccattcttataaatttgtaattcatgcctaatatttgatctcttgtttttcacagaccaagctgatgttactaacatcacacttaaaccagccactaatgcagttttaagcgcttaattagtaggtaagttacaagttatgtgtcacataaatataaatataatccttcttgtgaaatcacataaaatttgatataaagttaaattaatgtgggaagttggtttgcaggctttggcctatttgttgtccttttctgagatgaagaatggtggcatcgatccaaacccaaaatcagattcaaattcaatggattggttattgtttcattctgatcacattgtcatatccataaagaagggggaaaaaaaaagttagcactttgcagaagcattgcaattattttaagttgcaatagctagctgttagaaatgaaccactactgtgaaagatgttgaatcatacgtacgtgtgttctatcagagaagctgcttttgatcttgtgttactacggtagatgccaaatgagtggaagttgttcttgtttgagtttgctttagtaagaatccctttttcagtttgcagaatctcttgtatttattgtgttactatatattgtactaggtctggtgggaaataaaaattttataaattttaattttatagaacagagtgcaaatattattattgatataaattaaaatgaagagagaagttttacgcataaactaaccaccctccagccaaggttctatagcaaatatataaatgtatgtgcaagtttgttctcgtttaaaaaattctctagaaaaattgtccatcaaaaataattatttttcttaaaaaaaagtttcttatataaactaatagctgcaaattaatcaaagatttttaggaaatcctcatacattcgggggagcactggagcaagttgtgaatttttcctttacccattctatttgcacctcctctaattctcaattatcatttctaatgaactttgactagggatgttgaccggtccaatctctttaaggtttgacccatcaaacctgtgtgtcaaaagaacagaacaaatcagtccaccgaataaatgggcttcttttaagttcacattgtgtctttcaaatccgcagataaaaggatcggttcgaaccagtttgcaagtctaaaaaaataatttgaaaaaaaaaatattttttaaaaataaaaaatgtttaaaattagaagaattttttctcctaatttttaagttaaaatctatcatactaaaatatactaatatttataataatattaaagactaaatattaaagtagtgagacaaaaatataccaacatttattatatagtcgatctttactaaaagcatcaaaatgtcttaataataattagacgggtttcaaggatagtccgcagataactagatccacggattttgcaagcctagctaactcaaaaactcaatatgcaactatgtcaactttaaaaaaagagacctattgccaccaccccactcctcgtttttcgtttggtgcattgtgccactttttttcactgttcacaaataatcttcctgaaactagttttcaaaatgttgaattgcattttaaaaactagcttccataatgttatttctagacatttttaactaattcacttttt

SEQ ID NO: 259 - DNA, 6385 bp, Glycine max
tttttaataaattttaatcaataaaaataagtttaataattatatactgacaaaagataaaataattttgttgtatcatttaattataatttatcttagtaaactaattattataaaagttaataaaattattattatatatgtatagggggtgggatgtaagatgatatatcctcaaaatgtgttagagaacgtgctaaatattttatttttttttaagtttcccagcatttctcgatccatatttaaaacctaaagtcatccagataaactcaagtcggatcacgccgggcatgttatgcttacccctaattataacaaatttaagtcaaatttgaatttactctgaattgttatcaatgttaaaatcttacactactaatacataaaaattagtattttgttatttactgaatgtattttacacaatggtcaaaacgttgttttttttgttttgaatgcggtcaaaacggtttttaaagcatcaaaatacatgccattgtcaggtacgaaggttttttttttttttttcctttctatcgagggagggataataagaatataaaatctcgttaaataacgaataaaataaatgataagaattatgttaattgtcattttatacgcataattattgagcacaccgttatcttctagctgtaacatgctaaactcgagaacaaaagaaaaaaaaaatgaagtatatttagctgttgtctattcatttgttagccgttgtaattttttcacgtgtcattgtaatttttttatgaaaaaaaacgcccatgaaagaaggcacaagccactgtggccaattaatagctgttaccattttaatacactgagttttcaactttgaatggtcaaaagctaagggacaagaaaaccaggttacacttgctagatttttctatttttatttatttattttccgaaaatacagaattattgaagaaaataaataaatagttagaatgggttggttttcttctttgactgtcaccagcgcattatagcacaccacacaaaaaagcaaagcagaaaacaactgttacttacacacgccatgggtatgggtatgggtatgggtatgggtatgtatgccattatcatcatcgatctaactctaactctctctttctcttccttctaaccgccgcttccgcatctcgcttccttctcttccttctctaactatatatattttctttttctctctgtttcttcctttttattttatgcttttttctccgatgtgactggcgtttgtttggtgtgtttttcgtgtgcgtcgaaccctctgcgttcgttaattttgttttgtgttttcggatcgacttgtttcgcgttcggttgcggggatcttcggtttaggtttgtttagggattttttgttttttgttttttttttctgttgttcatgagtttttcgttggatttgttgtgttctgtgagattgatgggctttttttttaaaatttatattccttcaatgttttttcttttttggcaaaatgaatatttatttatgggcggaatgtatttgcgatttttgtctcttaaattcatgttcgaacggtggtgtgactttcctgtttggttctgtttttatgaagcctgttgactgcaattttgcttctgaaaaattaaaaaggaaatatgttactgtcatttttctacgcatatctaatatatcttctttttgttttttatttatttattttaattatggtggaattgttcattctggcaggtaaatgagtggtaaatgagtggtttttgagcagaagcagttaaaagagaaagggattcagcgaagatgacatcggttggtgtggcaccaacttcgggtttgagagaagccagtgggcatggagcagcaggtgttgatagattgccagaggagatgaacgatatgaaaattagggatgatagagtatgtaatttgtaaccccgctctttgatattttcgtttttttcatgttagttttattttctctatgtccatgttgttggttacttacagtttgcttcattttgtaggaaatggaagccacagttgttgatggcaatggaacggagacaggacatatcattgtgactaccattgggggtagaaatggtcagcccaagcaggtataccttcccccccttttttcctttatcaatcatatacacactcatttatgccgtttgaaatgattaactcttgcactgtctcactttctgtgcttaccttggaaggctgtaaacaatcaatgctacagcttcatattgttatttgtgtgcaaatgttttcccccactccctatagctgctgtgattttgaatattgacgtttgaattgacaatgattatcattgtccttgaagtcaataacagaaaaagaaaatcctcaatttggttatgatatcagctcgctgcttgctgactagaatctttttacgatgacgcgcataacttcttgcagtgtgcaatgtgtttttgtcatttcttgtgattggcaattctcctcaccgattttttactgattgatgaacttgtgatattattggatagggtgagaatgtcgtgatgtggtttttgtcgtatcatcactgtgatgaatctttttacggtgactcacataacctcttgctgtgtgcaacttggtttgtcgtgtcttgtgattggcaattatcctctccgattggtttctgattgatgaatcttgtgatattattagatagggtgataatgtcgcaatgtggtttttgtcatattcttgttaaccgtctattttagttcttgtgggttttttttttattctatatgtttattgttttaaaataatcttatactttatgttaatattttagactataagctacatggcagagcgtgttgtagggcatggatcatttggagttgtcttccaggtaaaatttccagttgactaaaagagatgcatttctttagccttttcaacacaagtgacataattattgccttagttctgacattgggtgtgattgtaggctaagtgcttggaaactggtgaaactgtggctatcaaaaaggttcttcaagacaagaggtacaagaaccgggagctgcaaacaatgcgccttcttgaccacccaaatgtcgttgctttgaagcactgtttcttttcaaccactgaaaaggatgaactataccttaatttggttctcgagtatgttcctgaaacagttaatcgggtgataaaacattacaacaagttgaaccaaaggatgccactgatatatgtgaaactctatacataccaggtatgactgttgcccttcctgtctccagctctcatcgttgttcaggctgtaacaatattttttttatgttgcagatctttagggcattatcttatattcatcgttgtattggagtctgccatcgggatatcaagcctcaaaatctattggtatggactttgttttaatttgcataaatcattgataatttattctgattctcttgtttcatagttatggttgtgtttaggggagctaaaagatgggaagcaactaattcaaactctgcagacagggctgttgggtggaaaatactaactgaatgtttttctgtgcaggtcaatccacacactcaccaggttaaattatgtgactttggaagtgcaaaggttttggtacgttatatatgtctgcatttcagccccttcctccttaaattattcctcttcattcaacctttctgttttccttggttagattgtagttttacttttccttatttggtcttgacctttgacaggtaaaaggtgaaccaaatatatcatacatatgttctagatactatagagcacctgagctcatatttggcgcaactgaatatactacagccattgacgtctggtctgttggatgtgttttagctgagctgcttcttggacaggttggtggctgttgatgtgatctcttttttttttttttttttggtttggcttacttaattaaaatttgtattttctttttacagcctttgttccctggtgagagtggagttgatcaacttgttgagattatcaaggtaatctttgtgatttctaactttctttattgttgttatatcttatttgcaagtgttttgaactgttgatctcatattttgctttagccttttaatattgaattggcctatttgatgacttgatcaattatataggttgccttgcttacttatgcagtgccagtattataacatgtaaatgatcatttgttgtgtgttaataggttctgggcactccaacaagggaagagattaagtgcatgaaccctaattatacagaatttaaattcccacagattaaagcacatccatggcacaaggtatcacaaataaatttaatagcatttcatgctttcttcttaagctcatcatattaacgcatttaaaaatccttattgaacacactatactaaaatatattcactgattttcttctctactagatcttccataagcgcatgcctccagaggctgttgatttggtatcaagactactacaatactcccctaacttgcggtgcacagctgtgagtatcggacttcttatcaaacttttagtatcccaccttaggaaaaaagataataatagtgcttccttggttttgcaagtttgtgtttcagtgtttggcaattttatgttttctaatctaattattcaatgtttgtgtctcaacatctgattatgtattgagtattttgtgatttttgctttgtgtggtgtagttagatgccttgacgcatcctttctttgacgaacttcgtgatccaaattctcgcttgccaaatggccgattccttccaccactatttaatttcaaatcccatggtatgttgattttggaataggctattgtgtttatgtgactttggtctttctttgttttcattaagaaattattggctgactttttgtatgttattggtgcttgtaccagaactgaaaggtgtcccagctgagattttggtgaaattggttccagagcatgcaaggaagcaatgcccgtttcttggcttgtgaagtgtaacagaactgcaagtgttgtttccatatgagaatgccgcgctttccttctatttaaaatgatatttgttggtatctttattgtattcggttgccctgtaaaatcagatttagagatacatgctactcattatcatcctaccccccgatgggtatgtagtagaataccctgtttcctgtatcacagcagattgtaacatacaatagaagacaaaatgtctgcaattatctgaatgttgcatcaatatttgtatttgttgagacactgatgggttgttatttaatttagttatgcttagcgtggtggttggaagttgtaatggccttgtctgtgcatttgtttattttccactctttaggtaaagctctgaccaaacgacttgggacgaagtcttggtgcttgtcttgtatatattgctcgattgatcgtgatcgatgttaatttaatcaaacagttaggatgacttacccttttttagtttcagtattattttcaatttgaggctgaggtgcttgagtggacttgtgcgaacacttaaaaaataatctttgatgggtaagaatgactcttgcctacggtacaaagaatatatacaagcgcgttcgaataaaatgacaaatttcttgggcatattttttctccccttttctttacggtaagaaaatcttcgtcaatggagactaaatccatgaggcattttcaagttgagagctattccttaactactttgaattccaatattcaaggttgagagcttaattctttaactactttgattaaggggtctaaggtcaatttggtggtttctgtcgttggattcttagcatgaggatgactattgacccttcatcaccactatctctttacattgaacaaattacagtaattcacgctccctgtattttatgcaaattatataaggtatccctacttttttttttctctttctaagtcacatgaatatcttattggaaacaattttattcgaattggatagaatcattatagacgataaattttttcactcaaggtattgttaagtataaaagcatttatttgacacttctcctacaacatcattaagttaatgatatatttcaagatataatattatcaatcattaagaattattattattaatataaatataaggatctattttttttggtgataatataaggatctatttacttgtgtttttttttctttctaatttcactgtttatttatgaaattgacaattttataatttaaaaaaaaaacacacacacacacaagtgtaaatcactaagatatctctgatatatatagtttctgtg

SEQ ID NO: 260 - DNA, 3765 bp, Glycine max
gcaagttggaacagaacagacaaaataactacaaactagcgtttgataacgaccacaggacagaaaacaaaactagcatgtgcctgtcactttcccaacggtcgccaaacggccatttctttcttaatcctgtgcctctcattttcctaccgttaacatgatatgaccttaggagagaaagttgaattgaaccaaaagtattcactcgctctgcatataacgggtgttttttttgtcaccacaaatcattaattatattttaaaaaacttgattataatatttttctaacataatcattactcaataatgtccaaatctagtctggttcttatttttttttactgaatggggattcctttttatacaattttagatactcatcaccaaattaatgtataagtaaatacttgacaatttatcttaaatatcatatatatatatatatatatatatatatatatatatatatatatatatatatatatatgcttggtaataccgcatccgaatcctcatatgataatttacgcatacgtagtcacaaacttattcacgcattacacatacgtggttgtttagcagaacacttctctgcaataactcatcttagttgtgtatgatgtactggtttttgaaagtagtagaaaaaattaaactatgcatttaaattaatactagtatcaattatatatttacacgtcctttttattgaaaagtgtaaaaaatagttttataaatacaaaacattaaaaagacaaaaatattagagacatccagaagtctgcggcggataacaacgagacaaaggaaccagccacagcaagtacctgctcacatccttccacagaaattacacatatctttatcttatttaacagctaaactaagcccacatcttattaatatcttaatctataataaaaatgaaaccataatagtacaatagctctttgctaaaaacaaaaaaacagtcacatttaacctttttcattggtttataataattattacccatggatggactttgaactacactacatattctctgaccaccctagctagctaattagatttctgagagaaaggaaagggtgtgagaagagaatggagagtaaagaggaagatgttaacgttggagcaaacaagttctcagaaaggcaaccaattggtacagcagctcagggtggtggtgacaaggactacaaggaggcacccccagctcctttgtttgaacctggtgagctcaaatcatggtccttctacagagctggaattgctgagtttgtggcaactttcttgttcctctacattaccatcttaactgtcatgggtgtcaacaggtcaccctccaagtgtgcctctgttggcattcaaggcattgcttgggcctttggtggcatgatctttgcccttgtctactgcactgctggaatttcaggtatacatattttttaccatattatggctcgatgtctgatctgaaacacatttttttttttgtttaaaggttttgaactaagccagatctgtgtttgtttgttgttgttgttgcagggggacacatcaacccagctgtgacctttggtctgtttttggcaaggaagctgtccctaacaagggcactgttctacattatcatgcagtgtcttggagccatctgcggggctggtgtggtgaagggctttgagggcaatgctaactatgagttgttcaaaggaggagccaattttgtgaattctggatacaccaaaggtgatggacttggagctgagattgttggcacttttgttcttgtctacaccgttttctctgccactgatgccaagagaaacgctagagactctcacgttcctgtatgtattctttcccactacaatattgcttattcattccactaatttggtttataaatggctatattctgactttgtaattaatgtggttaatgtatgatgctatgatataataattgtagattttggctccacttcccattggatttgctgtgttcttggtccacttggctaccattcccatcacaggaactggcattaacccagctaggagtctcggagctgccatcatctacaacagagaccatgcatgggatgaccaagtatgtttttttgagacttgaatttttgtttcatatattcccattagcataggaaataatgtaaatagttttattgaattttattataattatcttaccgagtcctcacttttgattaatttttttatcagcaaatattaattttataaaaaatattaatagataaattcaaatttgtaatcttttctttctttaccctttcccaagtaccggatgaaccttatatctccggattttgattcgttaacaatataaaacatttttactaatttgtgcattctcgttattttaaaccccacagaagatatatatatgctttaataataatgtaattttttattttatggtttacagtggattttctgggttggacctttcattggagctgcccttgctgctgtgtatcaccagatagtcatccgagccattcctttcaagacaagggcttaggctcttgtttttgtatgtgcttgcttgtattagttgttatttatgtgtctggtgtcttcttcattttgaaaattcatgtcaatctttttgcctttgtgttaatccattgtatggatgtaaattatgacatgattacttccttgattgtatttgtggcactctgaatggatttcttcttttattttattttttttataatggatttcttcttttaaggcggcttcaatagaaagaaaattatataatttcgattattcataaacactcgcactattaaaatccatggggagtttcctcaatgcctgaaactttgcaattaatcttaaaattcgaaggtttagttacttatttgatggataatcttttacctttcacagtccctgtaattagaaactactttttagatgatatgattcacatgaactaaaacaaaattttagaatatacgtgtaaagactaaaattagtaattttcatgggtaatgactaaaacgtaatattcttctttaaagtatatgtagttttagtacaaattaaacttgagaagtatttaatagtttgttgtgggatgatctaatgtgctctttatgatgaaaaagagcatcataaaactagtgaaattaatcaaagaacaatcttttaaatttgtgtaattcctctttatttttaaatgcttcgaatactaatatcttcttaaaaaataacagaaatcatgtagctaaaagaaaaactgaaatataaaaggaacaaattactaataagaaatagcaaaatcattgagaatttatggatgtacactataccgtgtaagaaattctgcaagtgtctaccattgttagagtaatatttattattctacatggtgtgtcattagattagacagaataagtgagatttgtgtcaattgattaaacaaatatgaaaaatgaatccttgtttaaacaacccctacaacaataatactgttcattccaagtcacaacaagtccacattttcttgcgatgagtatattggaccttgatttacataacatataatttgcgtaatgatttgtcatgttagtcatgtataactcattgaggaacaactttttctatcaatgtgcacatagcgatgtgtaaattggaccttgatttacataatatataatttgcgtaatgatttgtcatgttagtcatgtacaactctaattgaggaa

SEQ ID NO: 261 - DNA, 3778 bp, Glycine max
tacttttgaaatagaagtacatgattttgctaaaggatcgaaattcttattttttgtttttattttacttttgaatgttggatgtatatatttcaacgcttaagaattattcatggatttatttatgttgaagttggttcaatcgaatgtcaatcttatatgtaagaattctttggctgtatacttgtaatatctttttcttctgtcttttttttttgtttatcatttctatgactatcacctttcttccttttcatcatattagtatttattatatcttgtcattttagtttttatccatctccctcccttgcaccaaattcacaatatgccatggagatggtaaagaaacactagtcagaaaaaaacaagtataaaggggttgggaggggggagggtccaaatgtcaatttgcaaaatatggcaacatggctttgctctgcactgcaccttcttcctcttgtgctcgattttaattgggtgtgcccgggatgattgtcagagatcagaacccttcctctgcatacacgcacaatacaaacacacacgtagaaagagagtcacgggtttgtcttgaaaagccccttatttcagtcctagacacacagacagacagacacttattctctctcaccgcataaccaagcaccctaaacaattcaacaaacacatttatttgtagccaaacactaaggaccctctttataaaacttcaaatattttattgaaatatgaaaaattatattatttataatttttttttatttttctatttttttacgataaatattttttttaaaatatcttaagaagaccattaacaaaattttatttttatataacatcaacaaaggaaaacaatttccttcccctctccagaaacaacatccacaatttatttaaaataagaaaaagacagagccaaaccacattagattgtacccgcattaatttctctctcgcctcctttatctagcttgcaccattcccatgctttcactcacaccgtctctttctctctgatcttttcattctgtctcttctcttttcttttcctctcttctctctttacttccctcaatagcaaaagctatggctcttctactagacaactgtgaaagcattttgctgtctttggacacacacaaatcagttcctgcacctttccttaccaaaacataccaacttgtagacgacccttccaccgaccacatagtctcttggggcgaagacgacaccaccttcgtcgtttggagaccccccgagttcgctagggaccttctccccaactatttcaaacacaacaacttctccagcttcgttcgccaactcaacacctatgtatgtatcacacacccatcatatctctcttctttttttcttttttttttttaagttcttttatcgaaggcaatcatgtttgaaacattatcaatcaatatatatgagagacaaactttgaaacattatcaaacaatatatatgagagacaaaacttagaaactttaattccgattttaaaaaacgaaacagaaagcatttaaggaattaatatctttagttttttttttttatccaagtattggtagcgcatctccaactcctagtaagaattcaaactagtccttatgctagacctaattcccattttaatctcactttcaagatgttacatttttgcatgctccaaattgtgatttaccatgttgtggtaattagtccttcaagatgttacattttttgcatgctcccaattaactaacttggctttgaattttgtttgaatagggttttagaaagattgtgcctgatagatgggagttcgcgaatgagttcttcaagaaaggagagaagaacttgttgtgcgagattcacagaagaaaaacccatcaccagcatcatcaacaagtacaagccatgaacaaccatcaccaccatcataagtttggactcaacgtttcctctatctttcccttccacaataacagactcagtgtttccccttctcatgattcggacgaggtaataatacccaattggtgtgactcgcccccaagaggagttgccggtgtaaacaacaacaacagcagcagcaacaactacaacactgtcactgcactttctgaggacaacgaaagacttaggagaagcaacaacatgctcatgtcggagctcgcacacatgaagaagctttacaacgacatcatctacttcgttcagaaccatgtcaagcccgtggctcctagcaacaacaacaatttcccttcttttctactctgcagtgataatagtaatatcaacaacaacacatcaccacaaacacaaacacaagcacaagcctctcctatgagtaacgtttcaacggtgcaaaggcaactgaagcagtttgtagggtgctattccaacaacacaaagcaagcgcgtgctgtgaactctcccactaacagttccataaccattgttgaggaagaggctagcagtaacagttgcaagaccaagctttttggggtgtctcttcaatccaagaaaagggtgcaccctgagtacgggtctaacaatgttcttcaaagctccgaaacgaataaggcgcgtttggctttggaaaatgatgaactattaggcttgaatcttatgcccccttcaacttgttaattagttagttaagttagtcctcccaaaattcataaccttagaaccttgctattttctaattttaattgcttcatatatgtataaatatatatatttttcttctttaatcccttaatttgagttttgaagaaggcaaatgctgttgatggaagcttgtgttcgtgcgtgatcctgtgtacatttaacttggtgccgaggttatatccttcgtttttcctatccatatgtccgctatctataaatctattaattatagataataaaaatgaacaaataattcaaagaaaatatccgggaaattattgtataattgtgaatactatgtctctattgtcgataaattgataagtgtattaatttgtcctaaatagtaaagttaaaatcgaaattgagtgttgaatctacataaactttatttgtacttatgatgcaatcctaccccccaaggatattggatagaagacttcaattagattgggtcaaagatgcaagagaaggtcctagggttctcatgagccttaggataaatttctgagtccatgggccaaggttgggtccaattatctttgtacatattagattaggatgtcattatatttggtccttgtatttagcgttccatattgtaggtagggtatcctataaatataagaattttcagcccttgtattttagggcacctagactagtttttgtattaggggtagttttgtaatttcacatacactaagtggatatttgatatgtgtggttggaaataaatttaattgaattggtagaagcccaatccaattaaattttagtgggggaggtgagcacccctttttcgtaaataaattaaaaaatattttttatttaaaaataaataaagttttagaaaaatgatgagatttttataattaaataaataaggagaaataaatttattaattaaaataatggtttgataagaaataaaatagagttcccttttataaaataaataaataaatgaaaatatgagtaaataaaaggtcaagagtatcctacctataaatagagatgtaatatgttaatttttacatttatgacacgtctatgtgctctctcttcctctcaaattcgttttcccttcttcctttcctaa

SEQ ID NO: 262 - DNA, 3778 bp, Glycine max; identical to SEQ ID NO: 261

SEQ ID NO: 263 - DNA, 12577 bp, Glycine max
acattatggcggaagttgatccatgtagccgaccccacctagtgggataaggcgttgttgttgtttgttgttgtatcttaaaattatgttttattacctacatgtaactcaatattagtttcaaattcatattttatttaatgtattttttttttctgtcaatacttaaacattattattatccaaataaacaaaattatataagtgtgtacatatagtaataatttatatttatgaaatatctccttttgattctctatggtcattcaaattaataggaacgatgactcaaactaagaggagatattttaaatttttattgaagagttagatattttaattatgttagttaaaaaataagattaatgttaacataagattaatgtttaaaacgaaaaataaataaataattaataaatataatttaatgctaatcatcatcaaaataaatcaattttgtcaatgtcaatcaacatttattatttttttatcttttgcgtttaatttgtttcaatttccctttaatgaatgtttcttggactattaacaagtctaaggtacagattttgacacatgtttcaaatttatattttatttaatgtatttttttctgccaatacttaaatattattattatccaaataaactaaatttttaatcatttcataatgaattttaacactattgataaaaaaaagttaatgtttataccaaaaatgagtatgtctcattttgattctccatggtgaatcaaactaattcgaacgactttatttgcaatatcattaacaagtctacggaccttgacccatgtttcaaattcatattttatttaatgtatttttttctgtcaatacttaaacattattattatccaaattaacaaaattatataagtgtatacatgtaataatttatatgtatgaaatttcaaatattagtatgcacgaacgtctctctagttaagaaaaaaaacttattcccctccatggctgcaccaacctcttccaaattcacattgattgttatcttggtcaatatttttttttctcaattttcagtaaggaagtaatagaatagaatattgacattgacaaaggtatggtcgtagacgtgagcgcatggaaacccaacccggacgtgttgccgtagaaaaaccggattggatagtcggcgataggtccgaattttgtaagtggagagagagagatttgttctggcattgttttgagtctcctcgatcggtcaaaagaacacgcaaagcaaacccaacccagccacccccaacacaacacaaaccgtgtgctaacaatagtatagtgggtgtgaacccccaaaccctaatccttcgtttctatggtaataattcattctcttccatcgatcaatcaccgttccattttcatttcgctcagttccatagttcgctttttttttttttaatttgatttaatcagaccgagtgctgttggtgtcagcatgcgctagcttcgtcgtcgtcgtcatcgattttccggtttgtgattctcgtgattcttctcgggccgaattattgggtttgacggcatggatttggtaccgagcgtcaaggtatccttgatttttcagtttagggtctctaacgcacacacgcacgttctgaattgacttatagatgaacaattaaacactttgcttccgctagggattcatttgcatgtattgctaattcgtaaaaaaaaaaaacgcttatgattgatttatttggtgaccagaagtacacgaggtttagatttatatatatatatatatatatatatatatattggaagagcaagcaaattgtgtatttttttttaaaattggatttgcacggaaatgtgaaggagcttttttactgcaaaacatgtatgtgccttgttgatttgattggttggactttaatttttttttctttcttttctttatattcttggttatgtatcctgtaactggtttaatttttctgtgatcttttttttttttgttaacgatattattggatactttgtggacaatgtgattccgtggttggatactttttagttattcaatttttgatcctgctctactttttagctagctaaacttgaattccattcgcattacttcttcaaacgatggtatttttgttttcttcttttgcttttattctagtattggattttgtgtactgttgtattaatcattggggtatgctatttattttcctgatttattgacatctctttgtaggaaaagttgaactattttcgtataaaagagctcaaagatgtgctcactcagttacacctttcaaagcagggaaagaagcaggtgagataataaaactattacctactccgcctttgttattgtgaggctttttctatgatgaaaccttgaacgctagtactgactgacaccctgttgaatatcatttattctctgattactgtttcttgttgataacaagttcttctgtttataattttcttttcttttgcattttctaaacgtgttacatgcaatatatggatcgttgtatggatagacatcatacttaatggttaataatatgagttcacaactcttaaaatagatggatattgtcaatttatgacatgaagtttcatcttattgttgtagtatctttggtttggactccatatatcgtttcctttttaatctaaatttaatatgctgtctttgagtttttggatgatatagtgatgttgtgtttcgtcttttgtaggatcttgttgatcgcatattatccgttctctcagatgaacaaggtaaagttatgcacacatgcagaagcacaggactcaacctttgggtctaattctatcttatacatctggtttattttcactatgtttctgtttgagttgtgattatgcctatacattggaataaatatggttcacttttacattgtagtgtgtccaattacaggttactcacatgcctctcaatctctctccttcctccttttttcctgttaactaagcaacttgttgctcttttcccagtttcaaaaatgtgggctaagaagaatgctggtggaaaagaacaggtggcaaaattagtggatgatacatataggtcagtcttagcaacaacactcttgataatattttcttctagcttttgtatgcttcagatgcataccgtgacgtaacatacttggcttgagttcacataaatgatctggtaccttactattaggtctggtttacctcaattatagtgcttcatatatgatgtaatttcttgtctttgactttgttaccgtttattcacattcttgtattttcttttacttaggaaaatgcagatatcaggggccactgatctagcttctaagggacagggtgcatcagatagcagtagtgtaaaggttaaaagtgaatttgatgatgcttttcaacgagatgtaaagattcgctgtctatgtggaagtagattggaaacagaggatttggtcaaggtgtaccattaaatatggtttcttatttctttatgataaagagaaacactatacatcagtacatgcagatactatttattcagtcaatttattatctcatccacttttttggtggtcagatccacttttcatttatgtttcttactatataattttttaattttaattttcctcatcatattgcagtgtgatgatccaagatgccatgtgtggcaacacatcagttgtgttattattcccgagaaacctaccgaaggcatcccaccagttcctgataaattttattgtgaactctgtcgtctcactcgtgcagacccgtatgttgaattccctgcttactttagctaatagctatatgtggagtgggcgataatgatttgtctacagggttttccttatgatgaatttttaatttttgaatttcatgttaaagggttttagcatggcattttttcttctagggttgcatggttaacattatttgattatgattgcaatttctcagctacaatactctgttggtatggtgaactgggcttttgtagttgtgagcatggttatcaaacttgctagttgactcgtagaattgaacgagtttacaagtgcacaaccaccaaccgggtgaactcgctagcaaactggtttttgggtggactcacataaactcgtgcagacttgggtagaattgctcaaactcacgagtttgtgggtgagtcggcaagttcagtggtggagcaaaaattgctaaatcgacagtcgttttgggcttctgttttgcgatttccctcatcctccttctttcttttctcaatttcttttttctcttctccctcacaatttttgtctggttcagtcttccccatgccgattgaactcggttcagatgaagctctgttcaagtgactgctgctttgactctgcttgctctgttcaagtgactgctgctttgactctgcttgctctgtgagaagattacctgattgaaagaatagagccctattttaaaatggcatcgtattggttttttttttaagaacttgtcttagagcaaattatagcaacatcccgtgaggtttcgtgtaattacacaagcactcactaattttttaaccattactttcacctcccttgtaggaggtgttggtgtaagtttggagggcatattgaggggttgtcagtgtaatgttttcaaacatatagggggtgttagtgtaatattttcaaacttgaatggaggttaatgtaggaaaatcaaaaaagggtagggttatgtgtaatttgataaaagctcaagaggtgttgctgtaatttgctctttgtcttagctgaaagttggaactctcggtttgtttttgaatacatggtgccagctattgttggaacttttttaatacttttgaaagttagaagttgtcatttgtttatttttatttagcataacatataatgtataatatgttattaatagtaaatgataataatagtaatattaatgatataaaaaaccatttaaaacataatatataatataatcaactaaataataatataatggtattataaaatataaaaaactgtttataataaactaaataataataacctaaataaaacaggtatttatatgtatttattattatattattttaagtagactagactcttaggagttatgagtttaccgagctatcacaagtttacgtacactctcgagtttgataaccttgattgtgagatgatacaaaagtgcaatattgtaaaaaaagtttcagtctgatgattactttatggcccaataatggttctggagtttgtgaatttgttcatgcttattcagtcattcttctatggtaacattgttatatcttagtgtgttcaggttagttgtgaaaaaaaatatttcaataagttataaacttctagttgattatagatataagttatttttggtatattagttataaggtgattttaagataatttattttgttttgaatgtctaataaaaaaccatttaattttatattaaatcgcgaaagggctataagttaatttctagtagttagttttatattttaaaaaataatcaattgtcgaggataaaatgggaaaacaaaagttagctaaaaaaataatctgatagcttttgatcacgaggtctaaagttttgcttacgattgaaagctttttcctttagaaaaaggttttttattactgataaatttgttgatcattctagcttaaaaagcttccccccccccccacaaacaataatcatattcaaacatgtacctagtcttttagttatgcctagagataatcattatgattagtttctgactcacaaagatgcttgagttatatgttttctttcactttaattcttttgttctgttttattgaatggatcttgcctcattttgtctgttatattctttcataattgacattgttagtctatactttttattatttagtatttttcatatttttgccactcaactttgtagcttctgctgttctctgttacagattttgggtttcagtggcacaccctttgcatcctgtgaagttgaccacaaccagtaatccaactgatgggtgagtacatggtgtggggttgttgaaattaatttggtgtaattgggtttatttctttattaactgaattccttgttaatactgggattttaaatatactgtttgttacctaatttgcatataagagactaagatgtccttcattctgcctttttttgttctgttttggggggaaggggtgggtgggggtgaggggggtgttgcagtggggaaattgtctaattctttttgagcacgagtgcaagttccttgccttggtgataagcttttaaattgtttttttcgagttatgttgatgcagtgtactgtatgttttgttaattaaaattctctaggtattgagtttgattttttgtgatggaatttactcaggtaaataacctgttaagaactgtagattttctccttttcttctctctctgtttccttaaatctttattaggtgcagtttggctagtaaacttcattttatttccaagccacaaccctgtgcaaataattatctgcattgatgtttaaaaccaaattttcaatgtggctttcttcctgaatggcttatgttaaccgtattcctttttgaatttttcagaaacaacccagtgcagagtgtggagagaacatttcaactgactagagctgacatggacttagtatcaaaaccagaatttgatgttgaggttggtttggattttctgtgcatgtataataatgcatatccttctatgcattggttttcttactaaaaaaatgacttgtaggcttggtgtatgctcctgaacgacaaggttccattcaggatgcaatggccacagtatacagacctgcaggtcaatggtatgttttgagtcatgctctccttactaatttggaactagatttcatgttggaagtctagtttatttttcatggtatgttatgggactagaagcacatcattttaaagtaaaacaccaaatatatgtttgtgatgaaatctattttccttgatttgaccattatgattatataggtgttcctgttcgtgcaactaacagacctggttcacagttgcttggggctaatggtcgggatgacggtccaattgtaagtttgttgtcatatacagttatgaattgtgcaactatttaaaattgagacaagttcatttactatttgtatttgttttattcaatttcttattgtatttctcttttgtcagatcacgccatatacaaaagacggaattaataagatttccttaacaggatgcgatgctcgcattttttgtttaggggttcgtattgttaaaaggcgcagcatgcagcaggtagattgcactcttagcttgataaatttataagcaaactatttttagttactgttggttccttaatccatccttgtgatattgaaataatcaagtttaaagtatttccctgtatgatgttgggccaaagttcttgatattggttcctttttattgatttcttttgaaacttgacaaatcatgacatgcttttgcaattatctttattgtcaattttgaataacacctaaccacactcaaccttggaagatgtttcttcttccactataaattggaaagcttgtgtatgggcctcaaaaagtgttgcttctattctaaagtaagttaaaatattttgattttttttcttatagtttcttgagcattgtttcggttcaagttgtctggcttatgagacttttttgaataaaagaatgccaatttttttcacataatgataactagatctggtttgggttttgaccaagttttctggttttaattggttgtgacttgcttttggttcaactcttctctgttgtttgttattgagacagaccggaagcctggttgtcaattgtaccatcctatcagtctgtttttagatgttggtgttgaattttatgtttctactttgttgtgaatatgcttaacatacaactgcttcccttccgctactcttataaacttgttaaatagttgagtctttgttatctagatcctaaactcaatcccaaaggagtctgatggagagaaatttgaagaagctcttgcacgtgtctgccgttgtgttgggggaggaaatgcagctgatgatgctgatagtgacagtgatttggaagtggtttcagatactttcactatcaaccttcgatgtcctgtatggctttcatcaatagatgaattattttagcaattcatgaagtcctcctaatcagtttttttttttttggtgaaaattttagatgagtggttcaagaatgaagattgctggaagatttaaaccctgtattcacatgggttgctttgatcttgaagtttttgtggaaatgaatcagcgatcaagaaaggttaggttctaacaaatgttatgttgcatgatttaaaccccaatgtagtgattttaagtctgatgaattgaattgtttctacagtggcaatgtcctatatgtctcaaaaactatgctttggagaatatcatcattgacccttatttcaatcgcatcacttctatggtagttacttaaaaatttaataatttcttgtgttcataaatcttccattcgacaaaattctgtagttatttaaattactttggtggtatagatgatgaactgtggcgaagaaattgcagagattgaggtgaagcctgatggttcttggcgtgttaaggtaaagagtgaaagtgaacgcctggaattaggaaatctagcacagtggcgccttcctgatggaaccctttgtgtttcaactgatggagatgttaagagagtggatacattgaagcaggttaaacaggaaggtgtttcagacagtcctgctggtttaaaacttggcataaagaagaattgcaatggagtttgggaagtcagtaaacctgagggcacaaacacctcttctggtaataatttgaaaagggtttttggaaatcccgaacaggttgttattccaatgagcagcagtgccactggaagtggtcgggatggtgacgatcctagtgtaaatcagggtggtggtgggcatattgactattccactacaaatgggattgagatggattctttgtgtctcaataatgttgatttagcatatgaatatactgcacccaacacttctgcccaggtgggtggtgcagaagttattgttcttagtgattctgaagaagacaatgatctgttggcatctcctgcaattgcatataagaacaacagaaatgatgctacagatggttactctgtaccaccacctgtaattgttgattcatatactgaagatcataatcttggtggaaattcatgcttgggactctttcctaatgatgatgattttgggatgtcttccctatggccattgccttctggaagtcaagctggtcctggcttccagttatttggttctgatgcagatgtgtctgacgcattggtccatctgcagcatgatcctatgaattgctcctcgtcactaaatggttatgcattggccccagatactgctttgggatctggcggtatcttgcaagagtcctctgctggtcgctcagttgctgatttgaatggtggtttggtggacaatccattggcatttggtggagatgatccctcatttcagatttttctccccacaagaccagcagattcatccatgcacaatgaattgagagatcaagcaaatgtggctaatggtgtctgcactgaggaggattggatatcccttagacttggaggtggtgctggtggtaacaatggtgatgctcccactcaaaatgggttgaattctagacatcaaatcccaaccagagaaggcgccaagaatactttggatgatactggtttgttgctatctgaccttactgaaatgttccttattttttagtggaagttactcttgttggaaactcctttttatttcatggcagtgtgcagttgagtgtgactataggtaggaaatggagctttttttcaatgagagaataataaaatatatttaatgaagcaaaattgaccatatcctttaaattagtaaaagtaaaagaaaaaattagcagatttttttataaaataaaagtgtgtccttgttatatatgtaatacatcataatatattttagtttagatagatgtaatttataataaaaaattataaaataatttgataaaatatatgctctgcaaaatagaacatcttggccttaataattgagttttgtgacaagaatatttattatgcatccttttaacacttgaaaatgtatgcattcttgaaagcatgttagttttttttcttggacgcctgtctctgctatgtgtctctactgtagattttaattcttttgagagagtttttaattctttcatgcgtgatttttagtacatccctaagcttcatatcatgtttatttgagagggactatgaaagaggattggaagctgggtattcagtttctttgcatcgagcactgctattccttctgttaaatggttagaaaccttcaaatgtttagttgtggatttgttaagatacactatatggctgtgttaatctgctgatgcgtcatatccttgtgtcagaaaaagaatttttagaactctattcctaaaatcacccaaatgcccataatttgtttacttgcatagaaattagaaagtataaatggtttttttattacttgaaaatttggaggatgttaagttgaggaggttggtgttctctacatctatatgcattttgcaccttcttccattctcctcaccttcctcattgtgtttggccccctatcagataattgcattttgacctgagtcaatgatcattaatgctgttttgaagaaaaaaaaatccattaattttcttgattagttattcctctttatgcagcttctttactccttgggatgaatgatgttagatctgacagggcaagaaggcaaagatcagatagccctttctcctttcctcggcaaaagcgttcagtaaggccccgcttgtacctttctattgattcagattcagagtaaaggtcagaccttgtgtctcaagaactttaggtactcttaacatcagatttcgtatttagaaattgaagaaagttgagaggcatttttggtcctcatgaaatggcagttaatacataatgataatgtggtctgaggcatctctggtggaacagagctacaaattaccctgtgccaaaatgctttcacctaccccattggcaaagatgttggccctaatgattctttgctcttgatatctaaattgtccttgtgacagatgtttgctgggggtatagtgctggtttgttgtatagttaatcattcaaatctgtagttcaaactttcaaatttggtggtatattatttctgcatttttgtctctgctgagagcaataacctgtaaatgttttagccacatatcagatccaacagtgaaatcaaagatattgtttctggccatttttctagaatactatgttgtctcaagtatcatgcctcatgatcggccaagatagacgcccatttcataacacctggacgttgatatttatttaacatgtttaggcacctatgatgcctccccgtaaggatctatctatatttcttgcctggctaagtatttggtttcagatgagcttcttgtcattattctttgtttgcatagttgaatagagacaagagaaaagagcccctaaacgtaattgattagcctactattattgacaattattttaagctcgtttggctgatcaatataggttggtatctatattaaatttaatttttatgtaacttttttatattctctgtcctcaattacaaggttatttcaattaattcactcccttgagaaaaatagttggtttaattaattatattaaatttgttaactatttgtactagtattttaatattattttttcttatctttttatccacttaattatttttcatttaagtttggactaaaaataattaagagaatgtaggaaagaataattaatatatctagaaattaaaaaagtgatcttataaaaaagtgatcttataaaaaagtgatcttttaaaactataatttttttatttggtccccaaagaaaatattctagcggtctctatagtttattgctgacaaaatatcatcattttaaaattaaaactcacattttatttattaatataccaacttttagtttaattctttttataatttaagttttggtttatgtttcttattttttttataaaaaggaaacactttaagtctattattataaattcattacatgttgatgtaatagttaaaaaatatttaacatgaattgtttaatataatcattagaagaaaaactaacaatgagaagaataatattattcaataacatgtcattttaattttaattaaaaaagacaaataacaaataatttcaatctattaataaaaacaacataaaaaattactacataactattttcttaaaaaaat

SEQ ID NO: 264 - DNA, 6071 bp, Glycine max
aacatgtttttttaaatgtatttttattattgattaaaattaattaaaaattatttttttttgtagaatttatttttcatttaatgattttttcttttaattttataatttttaactaatgtgtgttaatagcaacgtgtaaaaaagtgtgatactaacaattatttaatatttcaaggaattcattccccaaaataccctcctccaccacccctaattactttcctattttgtcctccgcacatggtaaaacgtagtcataatcctaaaaagataaaaacgcttggaggtgctttgctcatcgaaatgattaacgattagaatttagaggctaacaataacaaaagctaattttgtgtaatttatctttcttgaggactcctcgcgctgtctatttccattactgggtaattaggcgccagaaacacgagggagaaagacaaccccgggatgcttttcgatttggttaacgtgggaaagttgtttaagaaagagatggttctttctttccctattttcccaactcgtatttaactctctgactccctctctaataaatagagaggaaaaaacagtaaaaaaagaaaaaaaattgaaagaaaggatcaaacacaaaaaaaatcacaaataaatagttaattaaaattatattagtcttaattttcttaaataaaattaaatttcatcttaaaattaatttattaatttacattgagtgaagttatctaataaatatataaattatattttaaggagtgaccctcatacgggatttgatatttctcaacaaataagatttcaacggtaagttttatgaattcaaaacacataattgaaaaaaatagaattttattaaaaatgattaattaatttctcagaaaagataaaacgataaatactgtgacatgataaaaaaacacaaaaataaaaattaaaacataaatagaaatatttgttttttcgagtgacgaatgacaaaaaaaaaggacaatttagagagagtggaaataatgagtcacattgaaaagtaaagagagaagcaagtggtgtgagagagagagagggggtgttaaggagagggtgagatgccttcgtctaagcttgctcaaactggcctcgtctatgctgtattgggcagttgtggaatacaaagatctttgaacatctcctttactacatttttgcaacacctacccctttctctctctctctttcactcatcctaggtttgatttttccttctctcaattcccaacctcgcatctcccattattttattctcaaaccacgacaacaaaagcacaaacttggtttctcaatttcttcctctcgatcctacccgagttaaattaaaaacaagaggagagaaaacaaaacagaacaaaataaaggtttggtcttttgaagtgggagtgaggaatcagacatctgggttggttgcttgctaggttcggttaatgttagaatgtgggatctcaacgactcacccgatcagaggattaacaaggacgaggaatccgaagaagggtgttcttccctcaataaaacttccttcgatggagatgatgacaacaacaacaacaaaggcaaaagggttggatctgtttccaattcaagctcttcagcagtagtcatcggagacgggtcagaagaagagtacgaggaggaagaagaagatgaagaaggtgttggtgttggtggtggaagaagtatgaagaaacgtagcagcaagattttcgggttctctgtgacccaaaatgaagaagagtccatggacagtgaccatccacctgtgactagacaattttttccggtggaagatgctgacgtggcggttgcaaccggtggtggtggaaccggtgtaagctcaacgttccctcgtgctcactgggtaggtgtgaaattttgccaatcagaaacacttggcaccggaaaatcatcagtggaagtttctcagcctatgaagaagagtcgccgaggaccgaggtcaaggagctctcagtatagaggagtcaccttctacagaagaacgggtcgctgggagtctcatatatggttagtaattaataatttccttccatttcatgaaaattgtgtttctttttccttctcgacaatcaaaatttgatttgttttttttttttttctggttctatttgtgttgcagggattgtggaaaacaagtgtatctaggtaagttcattgtcaactattatgattgtgtatgtgtgtgaaatgtgaaactgtggcagttatttttcctaaatattgttttaagcggctaaaacggttttttgtgtgtttttttgtcttggctgtgatgtggtggtagagacaaagagtgtgggtgggattttttttttttttttttgtggtgactgacttgatggtttttgtctgggtaaaatttgtctaggtggatttgacacagcacatgcggctgctcggtgagcccttgcccccctcctctagtattataccaagcttgtaatataactttttctatgtcttgaattgaacctaatctaattatcaaatattataaatcacatttcgttgtgggggaatgtgaggctcaaagaaaattgtgtattttccatctctctttgcagtgcatatgatagagcggctattaaattccgaggagtggaggcggacattaacttcaacattgaagattatgaagatgacttgaagcaggtgatcaatttgtgaatatttatattttgttttatcttatcttgaacagtcacacctcatacgtataggatcaccttatctcctacagttagtgctattttttctgtcttgaagtactctcatgattttgttaaatgcaatgttaatagatgagcaatcttaccaaggaagagttcgtgcacgtgcttcgccgacaaagcactggatttccgagagggagttccaagtatcgaggtgtcactttgcacaagtgtggaagatgggaggctcgaatgggccaatttttagggaaaaagtatgtgttattttcttatctttatttcttttttcttgaattttctatttgttgttgctattctaaatttttcttaattgtcatgactgagattaattcttatgattcattaggtacgtttatttgggtctcttcgacactgagatcgaagctgcaaggtaattaacatatcttgttttggtcacgttgttaattgtcatttctttttcaccttccaattactagattacccatctctatcaaagaatataaactattattattcatctttagggttttaattttggtccacacttttaccatagggcttatgacaaagctgccataaaatgcaacggcaaagaggcggtaacaaattttgatcccagcatctatgacaatgagctcaattccggtaagcgatgatggactacataaaactatatacttttttttctattaattcgtgtttatgttttattaattacatccacatatataatttatgtgtatatgtatacgtattagcagaatccacaggtaacgctccagatcacaatctggatttaagtttgggcaattcaacttcaaaccctggcaacgatcaagcgttggggaatcaagccccaaatgctgtaacccatgatcagcacatgccatctgagtctaattggcgtaatgggggaatcaagcctaaggttcttacttcatacactttataatataatttattattagtagtagtagtagtattttgtttgatggtttgttcattcctttttaagtttcctaatattcttcctttttatttcctgcttattaatttttccattcagctggtgaatatactcccaaaaccatgttacagaagcaacaacaaggacacacatggaagggatgtgcacggggagagtgaaacactgaggatgctaagtcaaacccaccttcattctccagccttcaatgaaatgcaacaaagatatggtccctacaggtctccgggaggagagtctcaaatgcttcaaaattttgcgcacattcacccaccaaattttcatgtgggtacctcctcaattaattttactttagctcacacattaaatagacataagaaaatatagaaacacgagccacccactattattaccatcattgaaacacattagcattagaattgtaagcacaattcttttttctcgttaaccaatgtcctttgagtatgggttaataaattaattgaaaaaattatttattatagaaatcataacatagagaaacagtataattttttatcttacaataaaaatattttcattttaaattttttaagaacacatgttagcatttttttataataaatatttatatttatatttatatttaatttgtaaatttgtaaatgtagtttcccagaagcagcattggaggccgaattgggagtgatctttcattatcagtggctgatcaacaacagtggcaaaccgggccttcacgttatttagcaactgctgcagcatcatcaagtttccaacaagagataagaccctcttctcaaggttggctgcagaaaaatgggctccacagtctcatgagaccctcatgatccctattataaatagagaattttctgcctcgccaagtactagttacattcaaataatcgtaatctgctccctaagtaatattattattgttacccttccagggtttcacccccaaaaaattattattttcttttcttagcatgtaaaataggatgcagtgttagattgtgtccatgtccaacccagacccctcgtcacacaaggccacaactttactattgaggtgaaaaagaaaaggataaaagaaaagaaaaaaaaaagaagagaaaatccaaattgggaacttactactggtctggggtcagtcaaactaacaaacggacgaaatctttaactagatattctgggctctgactaaaattttaggatcttatataactctgattttattgcttttctgcggttgtggtatatttatgacagcacctattcgtttcttgatttgggatgtattgctatcacatatacatggttgttgtcaatttgttccttatttctctttggtctttgaaaaaaacacttttccaaggaaagatgctagctttggttgcttagaagggaaataatgccgggttgtttatctttgacaaaaaaaaagttgagacaacaaatctagccaaagcctaaatgagaaaaaaaaatcaaagctataatgaatcggggaattttgttttttgtattttttatatggatatataggagtagggaatcagagatacaaaatgggtttattttctggtgtcttggaaatgtcatcggatggtgatgaatagtctcaatcaacggtgtcctttgaatcagttctctcggccaaaagcagtcagacaaagccattatggtgagagggacctatggttgtttgtctaaagcttcaaaaggatactgatacatggagtgagagagagtgaaaaaaaaaaaaaaaacaagcgaccaaaagggtataacggtaaaggggttttgagagggtttaacgctataactagccatgtcagttttcacctttacgacaaagcagaaaagtgaggacataaattagtgtctttgacattgattaaaaagataaaaagaaaaattataaaaagatattttgataatcatagctcacattttgagagaaaaaaaacaatgaaagattgatatacatatgatacataggtgatatgatttaataagaaaaaaaaataaaaaataataaaattatcaattaagtatttttaatttgtaggtgtcaaaaaaaatattattaaaaaatcataaaaaaatataaataatataatttatgtcttttagaaaaagattttttttttaattttttaactagtgtggttagtaacaatgttaattataaaagcaaaaacaggttttttttgttttatcatataataataggaggggatgtacttttgtggagcagaggtttcattggttaatagattggttgggttcaactattctagacttgtgagtttgagagggaacatcttctgactcgt

SEQ ID NO: 265 - DNA, 3703 bp, Glycine max
tcatatcttaatatttgtttttaagcctaaataaatactaagctggcatacgttcctaaaatgacatttataaacatcgaaggcttaataaatagaggtatatgtatatatatatatatatatatatatatatatatatattcataaatgagttaaaacagaattgacttgattaaaatttgtttggccttaaaaattgattagaacatttatttgaatttgaccaaaactcaataatgtttgaaatgagatagaaattaggtcaacctaatttattaacataatatttattactgtattaaacataactatatcttatagaattcaaaaaatataagaaactaaatttaagatatattttactactccattgattaataaataatacaaatatgatattatattaagtaaaatgccattgattagttaaataaaaagtcttattattaatatataattattgtataaaaattttaataaatgagaccctaaatattgagtcaaatcaactaaaagtacaacacaaattggccttaaaaccgctctaattccttaaaatgaaattgtcatcgtaagagaaaaatgaatttgcaacatcaacataatataatattgttggcaaacaagtttgtaccttaaacatgtatctcaatacttctagaaattaatccttaatatttagaagaaaaaaaaaacttcaagttcacccaaaaattgaagtcgcagcagagaacggttgttaaaattaaaccctacatgcaacttgtgtcagaaattaaaactttagttttgagttgataagttgatgttggtgaatggtgaccacgtaattaaaagttgagccatacccacgaggagttaattggaaaagtcgtcgttcgtcagaagaaggagcttcattctttatttatttttccgtgttttgactttgcttccaatttgaacacgcaaacactataaattacaaccacccaacccccacaccctctctcatcttcaacttgttcaactctctcaaaaccaaataaaatctttcacaactcaaaactcaagctccaaattttcactttacacctttgaattcattttttcacacatggacgagatcgacgtgcctccgttcttcgtgtgccctatttcattagagctcatgaaggaccccgtgacggtctccaccggcatcacctacgaccgcgacagcatcgagaagtggctcttcgccgaggtgaagaacgacacgtgtcccgtcacgaagcagcccctcctcccggacctcactccgaaccacacgctccgcagactcatccaagcctggtgcaccgtcaacgcctcccacggcgtccagagaatccccacaccaaaaccaccggtcgacaaaaccctcatcgagaaactcctccgcaacacctcggcttcggactccccgagcctccagctccggtccctccgaaccctcaagtccattgcctcggaatcccaatcaaacaaacgctgcatcgaatctgcagaaggcgcagttaatttcctagcaacaattataaccaccaccaccaccaccaccaccaacctactcgatgatgacatcgagttggaaataaaaacaagtacagcccacgaagcattgagccttttacacagcattcagctgtcagagtccggtttgaaggctctgttgaaccatccagaatttataaactctctaaccaagatgatgcaaagagggatctacgagtcacgcgcctacgctgttttcttgctgaattccttgtccgaggtggcggatccggcgcagttgattaacctaaaaactgatttgttcactgaattggttcaggttcttaaggatcaggtttcggagaaggtctcgaaggcgaccctgcaggcattgattcaggtgtgttcgtggggcagaaatagggtgaaggctgtggaggctggagctgtgccggttctggtggagcttcttctcgaatgcaacgagagaaaaccgatagaaatggtgctggttttgttggagattttatgtcagagtgctgacgggagggcggggctgttggcccacgcggcgggggtggtgatcgtggcgaagaagattctgagggtttcaacgatggcgaacgatagggcggcgaagattctgctttcggtgtgcagattttcccccacgccgggcttggtgcaggagatggtgcagcttggggtggtggcaaagctttgtctggtgctgcaggtggatagtgggaacaaagcaaaagagaaagctagggagattctcaaattgcatgctagggcttggaggaattcgccttgcatacctcacaatttgcttgcttcgtttccaatgagttcgtgaaagaaagaaaatccactttgtttttgttttgttcgtgacaccattggatgtaatcgattatttaagaaactaattccttctgtgagatctagtttgcggtgaaagaaaaccgaaagtaaatcacagttgagttttcaattgtagctagctagtttcttcggtggattcttgtttattattttgaattttggtgtttttcgtcattatgtgtacagaattgtttgggaacattcaaaggataggtgtgggcatcaaatgttgcccgaaacaaattggaaatttattgtcaattgcatatattaatggaatactgacacaaactcacactggttgttttgtggtgaacttcattactgattttgttattcactcctaattcttggatgttttaacattttattgttgatttaaaatttggttggttattttagaattccaaaatgcgatcatgtgttttttttcctcaattactcaattataccttaaaataagggattttttttttgacaaaaataatggaaagtccagtaaaaatgtgtctctctatgatgtttaaatgtgttccaaatgatttttaatataaaattttcttttttaatttcttaattaatgtcctaagataccgtttaaccagatttcttacttaaaaataattaaattctttatcagttaactaaagtactcattcaaaacattgattattaatcatattttcaactagtatatgattatcttttttatttgagctatgaaagatttcttcaaaaccaaatttctggttaatttagaagattcaaattcaagaaaaaaaaagaagagtaacatcagtagttacaagaaactgaaattttattccaagctcaatacaggagacctcttgataataatacaaaaacgatataaagccaaaaaaaaaatattcgtttgatgcgacatactagttgactcttaaacaaattagtagtacgttgctgttacttatttcatacaacaactattcttaatttttttgagaagtcagacttatttttttttaagtcatcaccactcgtaatattatcacattttcgagtttatgtaatggaaagggacgtaagttacatattatatacaattaattaatgtaatgccctatcacctctgcgtggacctaatgctttaatcgtttccacccttaattggaaattaaatcatacagctagattttggtatatctagttatacctacttctatatctgaatgaagaataagtacaccaagagggaaatatatagagcatgtccaaatatgtgagggcatagatatatagctggttctggttgttgaatatgatgaaaccgttaaataga

SEQ ID NO: 266 - DNA, 5897 bp, Glycine max
tctctctctcttttttgaatctttcggtaattctgaagcttaacactgaagaaactggtgaagttgggaatttcctttaattgcagcatgaggaatgtttgtgttcctagaaccacatgcaacacgtagaagagacaaggagagagacagaggaagaggcagagagaggagaagaacaaggagcttgttatcatcgtagggtccatggatgtaatggggtgcaatcaccttcatgagattattatccgactcaccagaattaatttatgtttctattagacaataactgagaagaaggattatgtacctaaagtgtaaaataattttatacaataaattattatttatgataaatttataaatttttataaaattatgttaaaggtcaaatacatttttgtgattagataataatataaaataaaattattattttatattttcagtgcattatcattaaattcataataatccatgttgaatttttctccgcctgaaaatactccaagactctaagttaacataatttcatgaaaactgaaaattggatctgttggctactatgtggggtcaattagcaccatctttacgtaagtaaaacaccacctcaaatattatggtagttgttggttaaaaatactaataatattatcattggttatcgagattgaagagcactgaaatgacaataaccgatgcttgaatttgaataaacgacacaagtcctcataggcttgtgtggcaataagatctccttaatactggtggagatagaaaaagcttgaataccaaccgcaaagtgaaggactaagagtgacaaaaaaccttgcaggcacagtatgctgccacgtgtcggctgatccatcctgtatgtgtggatgtaaggcttctatgaccaatccttttgtgtacactcactctaccaagcaactactataagtcacagcctctggtcacaagccacttagcattgaatttgcaattgaagttaaaagccttagccttccctacaactccaaacacaaagacatcatcatccatggctgcctccgtctccactgtcggagctgtcaacagagctcttgtatgatgcctttcccactttaatttgttacacttgcactttttttaattacaattacccttattaaggtcttatttcatatgcatgtttttcaatgcaagtacttcactcccctactttttttctttttacatgtcaatgatgccatgatatttttaataaaaaaattacgatcatgtttttgttctcctttaatttcccttacacttttttttcccacttagtcatcaatgcttaaaccttaaaaatggtaatgattaaatgatgaatagctaaaattcaaagtgtgacttaaaaaagtgtaaggggatgtaaaaacgagtaggctcaaatgaatgaatatacctcatgtaggcatgtagccttgtgccattttcaaataagttgtttactttatcttcattttacgtgtcatagtggcatagttacatgataagttcaaatgattgaagctatcaagtggcttcgtgtgcatgtttatacaactcatcattgttgcatgatataacatattgaaatcttaaaaaattaacgatgacaccccataattggaaaaatgttttattagttctgtacttttaatcaaatatggttcaaagtctttatatttttatattaatgaatttagtcttttaaattttgaaaaaattacgaatttaatccattttaaattttttttttatcatgttatagaaagttagaagagacaaaatctacatggcatttatagtttgagaataaaattcattaatataaaagtgcataattcttcactatatttgaccgaagatactatacaaaaacatattttctaaaaagaattaaggagaagagagagcaaatgtttgaagtactgaatatttattttactgtgacattgcagttgaacctgaatggttctggagctggagcttcagctcccagttcagccttctttgggaccagcttgaagaaggttattgcctcaagggtccccaacagcaaggtttccggtggaagcttcaagattgttgctgtagaagagaagaaagagattgaagagacccagcagaccgacaaggacagatggaagggtcttgcctatgatatctcagacgaccaacaagacatcacaagaggaaagggtttggttgactcccttttccaagctccacaggatgctggaactcactatgcagtcatgagctcctacgagtacctcagcactggacttcgccagtaagtagtcactatttattgtttttttttgttagttttgttagcagaagatatcgaatttgcaacttttcccctcttcgcttctcgtttatccatccaacccaccttatatatatctcccactagtttagtgttgtttacttctattttgttatgaacctgacccttaattatgatatgatggtgtttaaattaggtacttggacaacaaaatggatggattctacattgctccagcttttatggacaagcttgttgttcacatctccaagaacttcatgaccctgcccaacatcaaggcatgttaattactagaaagaaacacgttctctgcatcaaactactgatcttagctttttgcaaaattgggagacacattcattttttatttttttttcaatttttgcaaacaggttcctctcattcttggtatctggggaggcaagggacaaggaaaatctttccaatgtgagcttgtctttgccaagatgggaatcaagtgagtttctagctgaactagcccctccattatgtgcatttttagattcacgttagttcatccaaaaccacattgaaatatcagctcagctaatgtaattttatatataaaatcacttgttcgatgtcatgctgaggaattgattttgacttttaaacggctttaaaagtaacttttgtgtgttgggtccaaaattttatagtaaatttgggctgttaacttgctaattttaaaataaaatcgtctaaatataaatcatttcacctcaaaataagttttacaaaagctcactcaaacacacacaatggaaagaactgatgtcttgctatactcatgctgcatcaaagatttgaattattattgaacctcacaactaaaaaatccaacactctttaacttttaaacccctttgtggtattgtgattgattccattacagccccatcatgatgagtgctggagagttggaaagtggaaatgcaggagagccagcaaaactgatcaggcagagataccgtgaagctgcagacatgatcaagaagggaaagatgtgcgctctcttcatcaacgatcttgatgcaggagctggtcgtcttggtggaaccacacaatacactgtgaacaaccagatggtgaatgccactctcatgaacattgctgataaccccaccaatgtgcagcttccaggtatgtacaacaaggaagagaacccccgtgttcccatcattgtcaccggtaacgatttctcaacactctatgcacctctcatccgtgatgggcgtatggagaagttctactgggcaccaacaagggaagaccgcattggtgtttgcaccggaattttccgcactgatggtattcctgaacaggacattgtcaagcttgttgacaccttccctggccaatccattggtaagaaccaagcactacaacactaaggtgtagaatttggtggtacatgtgctaaaatggaacaaaacataatatataaattctattcaatgtttgatatgttctaaaaatagaacatcacggttagaaatctcgcattgactagtgatatactcaaaatagtctatataaatagaagaccatcctcacctgatgagatacttttaatattgaattagaatcaaactcaaattctaacctagtatcagacctgtcttataagatgttaactaaggatttgtatagtaggctatgcactgacttttacaaactacatgtataataagtttgctgatttttacaataactaccttaaaagtcgtaacagcaaatcctgattgattgacatttattctaatagtgcatagccattaaactcttgcaataatatcaccattgtttttcactttggatcttattttcaaatatttgtatagaactagtgaaaacaagaatgactaaagagaaaatactaatgttatcccatcccatgttgtactgcagatttctttggtgcactgagggccagagtatatgatgatgaagtgaggaagtggatttctggtgttggtgttgacagtgttgggaagaagcttgtgaactcaaaagatggacctccaacctttgagcagcccaagatgactctggagaagctcttgctgtatggtaacatgcttgtccaagaacaagagaatgtcaagagagtccaattggctgacaagtacttgaacgaggctgctcttggaaatgctaacgaggatgctattcagaggggaactttcttccagtcttgaattggaggtttgtatctagcttaatgttccttcaacttgcaattaattatagtgttaggttccaatatcacttggtctaaaattgttgaattgtttttttttctgtgcaggcaaagcaaacttggcaagtaaatatttctgttcgtgaaggttgttgtactaatccaagtgctagaagttgtgatggaacttgcgtgtaacattcttagcattctcaatgtcttaggtgcaaagagaagatgctaagtttgagatgatcttactatatttttcatattggaccgtcttcctctataattttgagttacagtgtccacttaaattgaatttggtgccttttccttttgtcctatattcttgatttatttttttaaaatttatttcttttgtttgacgtacaaatattagtacatatctagcccttatagcttcattttcaagtgctaaggatctgaagaacttggagagaaaggtcaagttcagagctcaataatgaatggcaagcggccaccaaatcataaacattacaaattgttccttatatacagtaactactttaggcccaaaaagaaatgagcacccaaaccacttatcaaataactcccatcagatgttgcactgataacactcttttaacgtgatctttcatttttcatatgttacactgtaatgttcttttagcatatgtacccttatgtaagtgtcgatggacattttcatgaatgaattattgaccccccgccaaaaaagaaataacaccaagaaaatgttatgcataatgcatatatgaccagagtggggctaggctatttatatggttgaggacttaaggaacatataaatcatgattagatgagacaagtaaagttcgtagtctttctaatcgctcgagagtagtggagagcctagttatgtttggataatcgtttggggagtccaagatacttatgccttactaaactcagtttactattatgtttggttgtccctaaaaaaattttgcacctacgttttgtgactaaattgagtttgtgtctatgtgttggaagtaatatatgggttgtttttgaaaatttatttttcgttggcagtatttattcaacaacacaagtaaaagatttttttattagtattatcgaaactaaacttattttatcgacatacttttgaaaaaattattcaaacgtaaattagattatagtaaactcttttttttttttttttatcaaacttgagtttacatcatacttttgattcaaattttttatgcaaattttattccaaacgcacttcaatatatttttaagtggggtgtaactaatgtgactttctctttatttgtgtctatgcaa

SEQ ID NO: 267 - DNA, 11025 bp, Glycine max
aatcgaatgaaattttttattggatggaatcaaatttaatttttaaatccaacccaattcaacaaaccaaatttgcatgtatatgcatatatttttattcataatttgataatatcactcatgtttatattattttatttcttgtatagttatagaattatcacataactaatacctatttataaaatatatttaattataaataaatttagttacataaagatttataaatgaaatatttgatattttaaattaatttttatcatgatttaatatattttttaaaaaaacatgattaaaataggaaatcaatccaatcaaaaacaaattaaaaacaaaattttaaacaaaattgattggatgatgaatttaaaaaaactaaaataattggattaaatgattttttttcatccaagtttaattcaatcgaatctaatataaaaacacccctacttactacccaaaaaaaaactaaaatgattggactagatgatttttttttctaagactaattcaatctaatccaatatggcaacactcctctctataacattaaaagtacagagttatgcattgttccacttaaccaatcattttcaaatttttattaatttctacatttttatctttctacatttttatcttgatcaatgttttttattgaaaagagaagtattagttacacattttttacttacttttttgaatacattattctcaatagactaaaaatttttttcattgaaaattataaaattagaaaaaagaatcattaagtataatataagatccaataatttttttttaattttcaataaattttaactaataaaagaatatgtttggaagcgtattagtaatatttattattttaaaataataacattgacataggtgtggtcgtacacgtgagcgcaccgaaacccaacccggacgtgttgccgtagaaaaaccggattggataatctggcgataggtccgaattttacaagtggggagagagagatttgttctggtattgttttgatcctcggtcaaaagaacacgcaaagcaaacccagtcacccccaacaaacacgagacaagccgtgtgcaaacaatagtcggtgtgaacccccaaaccctaatcgccaccacctccaatccttcgtttctatggtagcaactcattcccttccatcgatcattcaccgttccattttcaattcgctctgttccataattcgcttctctctctctcctctttttttttttttttttaattagaccgagtgctgttggggtcagcatgcgctagcttcgtcgtcgattttttggttggtgattctcgtgattcttttcgggcagaatttttgggtttgacggcatggatttggtaccgagcgtcaaggtatacgattcgatacatccttgattttttaagtttagtgtctcttacgcacgctcgttctgaattgacttatagatgaacaattaagcactttccctccgctgggggattctttgtaacgcgttgattttgcatgtgttgctaattaactttgctttgtacttttcataaaaataaacacttatgatttatttggtaatcagaagtacacgatgaagcaaattgtgtatgttattaaaattggatttgcacggatgatgaaggggcttttcttactggaaaattatacatgagccttgttgattggttggacttctagctctttttttttgttctttatatagtttttggtttgtatcctgtaactgattttattttttcctgcgattttaactactcagtacttactattttgacattatttatgttgtgattgataatgatattattggatactctgtggacaatgtgattccatggttagatactttttagttattcaattttgatcctgcactactttttagctacacttgaatttcatttgcattacttctgcaaacggtggtatttttgttttcttcttttgcttttaatgttttctatttgagtattggattttgtgtactgttgtattaatcattggggtatactattcattttcctgatttattgacatctctttgtaggaaaaattaaactattttcgtataaaagagctcaaagatgtgctcactcagttacacctttcaaagcagggaaagaagcaggtgagataataaaatactattacctagtctgcctttgttattgtgaggctttttctatgatgaaaccttgaacgcttgtactgactgacaccctgttgaatatcatttattccctgattgctgtttataatgagttcttttgtttataattttcttttcttttgcattttctcaacatgttacatgcaatatatggatcattgtatttggactgtatggttagacatcatacttaatggttaataatgtgatttcataactcataaaatatatggatattgtcaatttatgacattagttttcattatattgttgtagtatctttggtttggactccatggattatttcctttttaatcctaaatttaatatgctgtctttcagtttttggatgatacactgatgctgtgttttgtctttttttgtaggatcttgttgatcgcatattatctgttctctcagatgaacaaggtacaattatacacacatgcacagacccacaggagtcaacctttggtctaattctgttttattttcacaattcttctgtttgagttgtgattgtgcctatacattggaataaatatgaggctcactttactttgtagtgtgtccaattacagtttgctcacatgcctcattctctctctccttcctcctttttcctgttaactaagcaacttgttgctcttttcccagtttcaaaaatctgggctaagaagaatgctggtggtggaaaagaacaggtagcaaaattagtggatgatacatataggtcagtcttagcaacaacactcttgataatattttcctctagcttttgtatgcttcagatgcatgcagtgacgtaacatacttggctgagttcacataaatgatctggtaccttactattaggtctggtttaagtcgattatagtgctccatatatgctgtaatttattgtctttgactttgttatcttttattcacattcttgtatttccttttatgcaggaaaatgcagatatcaggggccactgatctagcttctaagggacagggtgcatcagatagcagtagtgtaaaggttaaaagtgaatttgatgatgcctttcaaccagatgtgaagattcgctgtctatgtggaagtagattggaaacagagaatttggtcaaggtgtaccattaaatatggtttcttctttctttatgataaagagaaacactttgcatcagtacatgcagatactatttattcagtcaatttataatcccatccgcttttttggtgttcagatgcacttttcattatagctcctatatgttgcttactatgataattttggaattttaattttccttgtcgtattgcagtgtgatgatgcaagatgccatgtgtggcaacacatcagttgcgttattattccagagaaacctactgaaggcatcccactagttcctgataaattttattgtgaactctgtcgtctcactcgtgcagatccgtatgtcaaatttctttcttactttagctaatagctatatgcggagtgagcaataatgatttgtctactgggttttccttgtgatgaatttttatttttgaatttcatgttaaagggttttagcatgccatttttcttcttgggttgcatggttaacatttccttatgattgcatgatgaactgggcttctgtagttgtgagcatggttatcaaattcatgagttgactcgtagaattgcacgagtttacgagtgcacaaccaccaaccgggtgaactcgcaagcaaacttgttttttggtggattcgtgcagacttgagtagaattgcttaaactcgtgagtttgtgggctagtcagcgagttcagtggtggaggaaaaaatagccttatcgacgctcgttttgggcttctgtttgtgatttctgttactcataaccccaccatgtttttgaataaaagctggaagttcaaggggtgttgctgtaatttactatttttcaattagcctaaaacaagtgcaaccccctggaggaaaaaatagcctaatggacaaagaacatattatttactatttttcatattttttccactcaacttttgtatcttctgctcttttctgttacagattttgggtttcagtggcgcaccctttgcatcctgtgaagttgaccacaaccagtaatccaactgatgggtgagtacacgtggtgtgggtttgttgaaattaatttggtgtaattgggtttatttctgaatgccttgttaatatatatcttggattttaaatatactgtttgttatctaatttgcatataagagactaaaatgtccttcattctggcttgaattcttcctcttttttttttggggggggggggggggggagtgcagtggggggaattgtctaattctttttgagcacgagtgcaagttccttggcttgatgataagctttttaattgcttttgagttatgttgatgcagtgcactgtatgttttgttaattaaaattctctaggtgttgaatttgcttttctgtggtggaatttactcaggaaaataacctattgtacattttctccttttctttcatctctatctcaatgtttccttaaatctttattaggtggagtttggctattaaacttcattttgtttccaagacacaaccccgtgcaaataattatctgcattgatgtttaaaaccaaattttcaatgtggctttcttcctgaatgacttaagttaaccatattcctttctgaatttttcagaaacaacccagtgcagagtgtggagagaacatttcaactgactagagctgacaaggacttggtatcaaaaccagaatttgatgttgaggtttgtttggattttcagtgcatgtatattaatgcatattcttctatgcattggtttgcttacttattgaacaaatgacttgtaggcttggtgtatgctcctgaacgacaaggttccattcaggatgcaatggccacagtatacagacctgcaggtcaatggtatgttttaagtcatgctctccttactaatttggagttagatttcatgttggaagtctagtttatttttcatggtatgttatgggactagaagcacataattttaaagtaaaataccaaatatctgtttgtgatgaaatctattttccttgatttgaccattatgattatataggtgttcctgttcgtgcaactaacagacctggttcacagttgcttggggctaatggtcgggatgacggtccaattgtaagtttgttgtcatatacagttatgaattgtacaactatttaaaattgtgagacactagttcatttactatttgtatttgttttattcactttcttatttgtatttctcctttgtcagatcacgccatatacaaaagatggaattaataagatttccttaacaggatgtgatgctcgcattttttgtttaggggttcgtattgttaaaaggcgcagtatgcagcaggtagattgttctcttggcttgataaatttataagcaaactattttgaattactgttggttccttaatccatccttgtgatattgaataatcaagtttgaagtatttccctgtatgatgttgggcaaagttcctgatgtggtcccttttgattgatttcttaaaatttgaaacttgacaaatcatgacatgtttttgcaattatctttattgacaattttgaataacacctaaccacactcaaccttggaagatgtttcttcttccactataaattggaaagcatgtgtatgggcttcagaaagtgttattttgtattgatttttgtcttgtagtttcttgagcattattttggcttaagttgtctggcttatgagacttttttgaataaaaaatgttgaatttttcacataatgataactagatctggtttgggttttgaccaagttttctggttttaattggttgacttgcttttggctcaactttttgttttttgttattgagacagactggaagcctggttgtctattgttgaactgtcctatcagtctgtttttaaatgttggtgttgaattttttgttcctactttgttgtgaatatgcttacatacaacttcttcccttccgttactcttgtaaattgttaaatagttgagtctttgttatctagatcctaaactcaatcccaaaggagtctgatggtgagaaatttgaagacgcccttgcacgtgtctgccgttgtgttgggggtggaaatgcagttgatgatgctgatagtgacagtgatttggaagtggtttcagatactttcactgtcaaccttcgttgtcctgtatggctttcatcaatagatgaattattttagcaattcatgaagtcctactaatcagttttttatttttggtgaaaattttagatgagtggttcaagaatgaagattgctggaagatttaaaccctgtattcacatgggttgctttgatcttgaagtgtttgtggaaatgaaccaacgatcaaggaaggtaaggttctaacaaatgttatattgcatgaagtgtccactccccaaagttgtgatttttaagtctgatgaattgaattgtttgttcagtggcaatgtcctatatgtctcaaaaactatgcgttggagaatatcatcattgacccttatttcaatcgcatcacttctatggtagttacttgaaaatttaatttcttatgttcataaatcttccattcgacaaaattctgtagttatttaaattatattggtggtacagatgatgaattgtggcgaagaaattgcagagattgaggtgaagcctgatggttcttggcgtgttaaggtaaagagtgaaagtgaacgcctggaattagggaatctagcacagtggcgccttcctgatggaaccctctgtgtgtcaactgctggagatgtcaagagagtggatacattgaagcaggttaaacaggaaggtgtttcagactgtccggctggtttaaaacttggcataaggaagaatcgcaatggagtttgggaagtcagtaaacctgagggcacaaacacctcttctggtaataaattgaaaggggcttttggaaatcccgaacaggttgttattccaatgagcagcagtgccactggaagtggtcgggatggtgacgaccctagtgtaaatcagggtggtggtgggcatattgaccattccactacaaatgggattgagatggattctttgtgtctcaataatgttgatttagcatatgaatataatgaacccaacacttctgctcaggtgggtggtgcagaagttattgttcttagtgattctgaagaagacaatgatttgttggtatctcctgcaattgcttataagaacaacagaaatgatgctacagatggttactctgtaccaccacctgtaattgttgattcatatactgaagagcataatcttggtggaaattcatgcttaggactctttcctaatgatgatgaatttgggatgtcttccctgtggtcattgccttctggaagtcaggctggtcctggattccagttatttggttctgatgcggatgtgtctgatgcgttggtccatctgcagcatggtcctatgaattgctcctcgtcactaaatggttatgcattggctcccaatactgctttgggatctggtagtatcttgcaagagtcctctgctggtcggtcagatgctgatttgaatggtggtttggtggacaatcctttggcctttggtggagatgatccctcacttcagatttttctccccacaagaccagcagattcatccatgcacaatgaattgagagatcaagcaagtgtggctaatggtgtctgcactgaggaggattggatatccctcagtcttggaggtgggactggtggtaacaatggtgatgcttccactcaaaatgggttgaattctagacatcaaatcccaaccagagaaggtgccacgaatactttggatgatactggtttgttgctctctgaccttgctgaaatgttccttattttttagtggaagttactcttgttggaaactagtttttatttcatggcagtgtgcagttgagtgtgactatagctaggaagtggagcattttttcaacggagagaataataaaatatatttaatgaagcaaaattgaccatatcctttaaattaataaaagtaaaaagaaataaatagcagattttttataaaataaaagtatgtccttgttatatatgtaatacatcataatgtattttagtttagatagatgtaatttataataaaaaattataaagtagtttgataaaatacatactctgctaaatagaacatattggccttaacaattgagttttgggacaagaatatttattatccttttaacacttgaaaatgtatgcattcttaaaagcatgttaattttttttcttggacacctgtctctgctatctatgtgtctctaccgtagattttaattcttctgagatggagagtttttaattctttcatgcgtgatttttagtacatccctaagcttcatatcaagtttatttgagaggggctatgaaggaggattggaagctgggtattcagtttctttgcatcgagcactgctataccttctgttaaatggttagaaaccttcaaatgtttagttgtggatttgtcaagatacactatatggctgtgttaatctgctgatgcatcatatccttgtgtcagaaaaagaaattttagaactctattcctaaaatcacccaaatgcccataatctgtttacttacatagaaatcagaaagtataaatggttatttttattacttgaaaatgtggaggatgttaatctctaaataaagttgaggaggttggtgttctctacatctatatgcattttgcaccttcctccattcttctcaccttcattttgtttgcctccctatcagataattgcattttgacctgagttaatgatcattaatgctgttttgaaattctacttttccattacttttcttgattagttattcctctttatgcagcttctttactccttgggatgaatgatgttagatctgacagggcaagaaggcaaagatcagatagccctttctcctttcctcgccaaaaacgttcagtaaggccccgcttgtacctttccattgattcagattcagagtaaaggtcataccttgtgtctcaagaattttaggtactcttaacaccagatttcgaatttagaaaaattgaagaaagttgagaggcatttttggtcctcatgaaatggcaattaatacataatgataatgggtctgaggcatctctggtggaacagagctacaaattaccctgtgccaaaatgcttgcacccacccccattggcaaagatgttgtggccgtaatgattctttatgcttgatatctaaattgtccttgtggcagatgttgatagatggactttatcagccaaaaactctccattatatctgctaagagctattattcccgtcaattttttatgagggtgtatgccggggttatagtgctggtttattgtatagttaatcattcaaatctggtagttcaaactttcaaaaaagttgggtggaacattatatctgcatttttgtctctgctaagagcaataacctgtaaatgtttagccatatcagatccaacagtgaaatcaaagatattgtttctggtcatttttctagaatactctgttgtgtcagtatcatgcctcatgattggccaagaatggtaaacgcctatttcatgacacctggacgttgatatttgtttaacatgtgtaggcatctgtgatgcctccccgtaaggatctatatttgatttcagatgagctttctttgtttgcatagttgagtaaagagaaaagagcccccgaaacgtaattgattaagctattattttaagctcgtttggcggatcaatataggttgatatctgctgtataaaaaagtagacactggaggaacatcgtttggttatggtcaccattgccatttctgttcatttagtgctggttgtttatgtagtgaattcaatttatattaaattcaagtttttgtaactttttgatacgtagtaaggaaaggatgatggataagctatgaaaaagacgctgagacacactagaggcacgtctgaataagtaattgatttttttttttaaaataggggtgtatgctgagtaagagaaaattttctaagcttctcatagatattccaaagacctcctgggacatttttaatgagttgcaaactcattaaacattaccctgtcatcaaaatttagcatactcgtttttcgttaaattccttatatcttgagaatattttttaaacttaatttgtgttgttacttatcactaaattaaattgatcaaagggtctagttcagtttattgagtagaatgagttatttctttgattatatgttacatgttcaaacacaaccagtgtccacgattaaaagggatcaacattttaaaaaaagttatgtaataatattttatgttgttttcattaatatattgatttttttatttatcatctaaaagaaatatttttttattcaaactaaagtaagacaagttattaaatagtattattcttctcatcattagtttttcctctaatgattatattaaaaaattcatgttaaataatttttaactaattatgatatcaacatataatgaatctataataataaacttaaattgtttacttttttaacaaaataaaaaacacaaatcaaaacttaaattataaagaattaaactagaagttaatatattattaataaggaacataaatataagttttaattta

SEQ ID NO: 268 - DNA, 4330 bp, Glycine max
actaagaccattttatttctcctggtaaagctaatatctatctatcgcttcaaattttcaaaaaacctgatcggtatctaccactttggaattttctacagattccttcgtgtttattctaaaatcaatgaaacggtgtttcttttttgttacaaaatcaatgaaacggtgtttaaagatttaaaaatctttcaacataaaaaaaaaaaaaaaaaagttgaacataggaagtaataatgcttattttgtatggttatttattcctattattttattgcacgtgcatcactgactgtcttctagttttttttagcgctattttcttatttattgaaaacctcatttatgttaaatgaatggaaggagaaattcatcttattttacgtattaaaataaatattttaaccaacaataaaaaaaattaattaaagtggctttcaactatcaatttctttctccccatctcttctaaaattgacttttagttataaaaaattggttgacttttagttaattttataatttaccgaaactcacttgttatttttggcgtcatttatatctattatatagaaagctacaagtccaatttaaaggtaaacaagcagatctcgtataatcgggctacgggcccagtttcgtttaaacgaggcccactttccagacatcagtaacatagacgaagctcaatatataataataatcatagcaaagattaacatcacaagatatttatctttatccaataaaataaaaaggtttagcaatggcataattgagaatgtacgcaaaaagagaggtacataacggaaatataaaaaaaacgacgtgcgcgttttagtggttcgggaaggttcgagcgccacgtgccagctggttcgggactccgacgcatgataacgcgactaagaaatcgccacgtcaccatttctctggggtgcaattaaaaaatatcagaaatatctagagaaggctataaatagatattccaaggtgccagcccagagatttttctgaatccgctatagccataactcttcacgaacaagaactctactattactattaatcaaccaaaatctctcttcactccaaacagaacacactagcgagaaaaaaagtgataagcccaaaaactctgcgttctctcacaaattaaacagcgtcactatcgcataggttagtagcattcttccgattctttctcatgtcttaataactgtttctggatttccattctgcaaattcctttgtgcgatttttgtttagggttttctttatttttttttttaatttttagggttctgcttctggtttatttattagtcagtgtcatgcttttataggttttttttattaaaaaaaatagacagaaaaaaacgaacttgctgagcaagttttttatttctattacttggggtttagctttatctattacttggggtttacgaagattcgtttcttgattgaatttattattatggctgataagttcgtgttgcgaaatcctctttatacttttccacctttgtgttctgttttgttctcttggttactgaagagttctgttttttttttcttcttctctaacagattgtgaattcagtgattgagttttgcggtgtactgtgttgcgaagtctgtgtatcagatttgtggacatgggtgcttatgatcaagtttctcttaagccattggattcttctagaaagaggaaaagtaggagcagagggtatgggactggatccgtggctgagactattgcaaagtggaaggaatacaacgaacatctttattctggcaaagatgatagtagaacaactcgaaaggcaccggctaaaggttcgaagaaagggtgcatgaaagggaagggaggacctcaaaactctcagtgtaactacagaggagttaggcagaggacatgggggaaatgggttggtgagattagggagcccaatagaggaagcaggctttggttgggtaccttctcttctgcccaggaagctgctcttgcctatgatgaagctgctagagctatgtatggtccttgtgcacgcctcaattttcccggcatcacagattatgcttcttttaaggaatcgttgaaggaatctccgatggccgcatcgtcctcttgttcttcggcagaaactgcaacatctgacactactactacatccaaccaatcggaggtttgtgcagctgaggatgttaaggagaatcctcgacttgtcaatgtgaatgataaggttaacgattgtcataaggcttatgaagctgcctcaccaactagcagaatgaagcaagagcctaaggatgaggctgtggatcacatggtccccggggctgggaaaattctagatgtcagaccagaaggaacacatgatgccgggcaggttgcagaggatgtaaacaaagatcagatggacttgccatggattgatggctttgattttagtgacaattacttgaacaggttttccacggatgagttatttcaggtggatgaacttttggggcttatagataataacccaattgatgagtctgcgttgatgcaaagtttggattttggacaaatgggttttcctggagatggtaatcctcaggtggatgatacgctttcaagctttatttatcagttgcaaaatccagatgccaagttgttgggaagtttgccccatatggagcagacaccttcaggttttgattatggattagatttcttaaaaacagtggagccaggggattataatggtggaggggaagaaccgcgatttcttaatttggatgatgatctgaaccctgattcaaagggcatgcaagcaaggaaggatgactagagaaggcgacgtgcataagtctatcatctgcctcattttcaactggttcgagcatctgctagtaatctgtctcttaggttgttgtcccctttttagctatatacaggtgcataagaggaatacaactatacaactaatacaagaaatttgatttgtttatgttcttttaatatgctaattctctgtaagattttttaaaatggagaatttagctgtgacaatatttgttaattctttttacttacatgttttttgggattcaaattggactgcctttaactacataggtggagctgaggagtagactgtttgaagtcgtttggctgactatagttgagcactgatttggatacaaaatttctttgttatgtaccatggagaactattatatctcgagtatattatatcgttgctcactttttgtgtataaaaactgaacaagtagtggaatgtatatatatataataactattctaaattttgttactgtccctgtcgtgttctttatttatacttgtcctctttggtagttcaattggatatgcatagtctatttcgggttacaggggactaaattgtcagggttgattccaatagaaacgaaaatgttagttttctttatctatgagcaatagatgaataactttagctattggataaatgaaactattatcaagtatgttgttttaatttagttcatctctttttctctctatcacataattgtgagcactttcatgaagaagaagactttaaatgttacatttttatttgaacgtttagttatttaaatttcgcatgacctacttttaagaaattattgtggttacatttttcaaacagtttaattatttatgtttcacaactcggttataaaagttattgtgatgatatttttcaaagagaaatgacaacgtataataatttatataatattacatcttttgtttatctctttcttacatgatattatatattacattttaaatttaaatttatctttttttcacctttttagttgtatattttgttttgcaatttgtcatactataatatcttttttttgaaattcaaaaatttaaagattactataaagctaatgtgaaagatacggaatttatttgataaaatagggatctagaaaaatatataaaaaaagactaaattatgtattttataagaaaatagttgataaaataagtgatacctatatcaaatattagaatatatatataaaaaatttatcttaagaatatttagattaaatttaaaaaattaaaaattaaaatatatataaaaaaataagatcagtttcctatacttcatttgtttgatctctacattcgatcggttcaccatgattctgaaatattctaattttttaaagtgtttagatcaatcactatatcgatttttgaccacctaacctattgaaacaatcatccgtctgatttttaaaaccatgataattacaatttcaaaaatcc

SEQ ID NO: 269 - DNA, 3051 bp, Glycine max
atcatttagttttccagaaaataatagtttatataagttaattttaatttattaaaaggtttgtttttattatacatacatgataatatacacatatataacaacaaaatcattgaaactaagactttgcttgcacgttacagccatagttcatagctcaaccaagtgaccaaatcctcaactcatgtcatgtttcactttctttacctcctcaactgtctgagaacaaagtcaacaagacttaattatccataaaatttgcaatgcagaaaatgttacagtcaatccttagaaaataaatatattcttctttaaatattattacctccggtcctttgtaatacatgaaaacttattttatattaaaagtactggagagtataaaattctttcatatggatcaaaattaaatcaagtaatactttaaaaaaaagtcaaatcaaataattaatactccccctattttaaagtaaatgttattctaagttactctacaaaaactaataaataaataattttataaaattaatattattaaataaatgaaaaaaataatactagtattacattaaaaaaaactaaagtacatcttattagaaatatcagtgaacaaaaatcattactaagttagagagattcaagttacttaaattatattatttctaatttcaagtttgagaaattaaccatctacataaggtataaagaaacacttgacaaatagatagttgaaaaaaaaaaagcagatgaaaaattcaaaggaaaagcacctttttaaagtaaagacagtagaaaagacaaacatgatgaaaatagtagtataaaaaggggatgcagttgatgtggagcaagaaaataaaagctgaaggcattgaggataaagaataaataattgctgaggcaacacgatgtttcgtggttccatcgtagcacgagggttgaaagtcgcctagacgttaaaaaatttacctttctccccactatatatatgcctttccactcaacttagatacacaacacaatactcttcaaacactttaccttcttcttaagacaacaagctaaaagcgcttctaacttaagtgatggctaacgctgctgaagtttcagcgttgaaacgcatcaagttgcatcttttgggtgaactctctccactggccactccccaaaacaaatttgaccaaacaaaccctagcccctctgaatcttccaattccgaatcttcttctatttctcttaaccactacttcactgacctcctcgaacccgaaattgaatttcctctcttcgaattcgattccaaaccccaagtaatcgacctcgaaaccccgaaaaccctaatttcagctgagaagaagcctcaatttaatcggaaaccgtcgctgctaatcgctgttccgaagaagaccgagtggatccaattcggaaaccctgaggtggcggcgccggagaaccagcctgagaagaagcactacagaggtgtccgtcagcggccgtggggcaagttcgccgccgagatccgcgacccgaacaagcgcgggtctagggtttggctcggaaccttcgacaccgccatcgaagccgccaaggcctacgaccgagccgccttcaggctccgcggctccaaggccatcctcaacttccccctcgaagttaacaccgcggcggagaccgtctccgtcgccgccgtcgacgtcgagaggaagcgccgccgcgaggaggaggaggtggtggtggaggatgtaaaggcggtggtgaagaaggagaaaataacggagcatgatgtgagttgttttagggggatgccgttaacgccgtctatgtggaccgggttctgggacagtgacgtcaaggatattttcaacattccgccgttgtcgccgttatctccttttggattttcaccgctcgtggctgtgtgaaattccaatttaggactgcgttttttcgtgttttagtacttacagcgtcctcctgttcagggatgagtacattgtacatttgacgaatttgtttattcaacaatcttttattcacttttatttgctacatacatggttcattttttgtcttttatgtcaaattttaaatatttgcaaaagattaatcacttaaaccttgaaaactttaattgtatcccgtgaatctcataaccgaggaaaagattcacaaatttttgcatacttttacctttgtttaaaaaatgaaacatccatgagcttaatctcctaataaactattttcaagagcttaaaatcaattaagcatgttctgaactatttttaagaaacagagccgggttaatcgaataaagattgggtaacccattacaccaagtcttatttatagctttttagttgaaaattacaattctgttataattaattgattacaagaggacacaatcaattaaaccaagaacaagccgtgctttgtacaagaacaaatgttgttttagtcgcttaaatctattactttgttattcttgagaaaaccatgagttattattttaatcgattaccagcttagtctaatcaattaaaatgctcttaaacttgtctagaacaactcagacattttaattgattacttcattataatcaattatttcagttagtttttgaaaaatattaaagccaattaggctctcattctctcataacttccgtaagcaaaatttcggaagtataattgtctttgagggttttgaacttcttcaagatataagaaaaacatcttcgcataacttgtttaccccctttgttgttgataaccatggattagtttctacatgggcaaagcaatctatatatagttgtgttcttcacattcaggggaatatgttccttaatcttttgatttgtaagaatttcatggatcttgagataaggtttttcaagggttgttcttgttacaatatttcataagaagggtattaggattcttattgtagggttcgagaaaaaagtgtaatgtaaaatttcattatgtatgccctgtgtgtttatattaaattctgaaatctttaatggaattcaatcttgttagatt

SEQ ID NO: 270 - DNA, 4024 bp, Glycine max
ttttataaaaactaaaaaagacaagcatgtccctcttgtccttagaaaagagtttgacaaagaggtttagaacatattggatcacaggatcatgggtcagagctagaagaatataaggaatgattactcggttcaatggaagggtgagtcagaaattgatgcaagatgggaagagagattgaatggaaaggaatgtcgacccattaaaccgttgacatgtattagtcaatgtaagcatgtaacgctcaacatctaaatttggatttagagatcaaaattgtgtgattgaatataaaagaaggattaaatgtgtaaataattttaaagggggggaaaatcgaaattagaaataaataaggaaaacaaatttacaatttgacctttttaaaaagtctaatgatggttaattttatctcacaaattattatagtaagaacataattatatacaaattatataatcatctttaaccattaaatacatgtatataaattgaaattaattagtgtcatgtttttttttccggggtaaaagattttagtgattttattgtattagacattaattttgcttgtagtatgtgattatagcttattcacaaaaattttagccacaatgaaatttccaaacgcgacaggtcttacgctctgcgccaatcctttttgttttgtgggtattgatattttgtaaaattaataaataaatacctggattatttattaattattaattaagtttttaagctaaaaaaaagtatgattaaatctcttatttttctttttaacttaagtacttaaaattttaaaattaccgcaaattatcatttttttctggacagttttaaaaaaccaatcacaaaaggttgcaaaatcaagaacttcatcatacagtaattttttaatttataagcttagttaaaagctttcaaataatttgggaacctaccaagtactaattaatttatcatttattttgaattggtacatgatactactacaatacaagggctaagatgagcggcacgcgccatgtattggtagtgggattagaattttgcttgtatctttctgtcatcctttacctcgcacttcgggaactgctgccactttcaccctttggattctttccttctcaaaccacaaagcaatttgtccaatttggatcacacactcagatacagccgtttagaaagaccttcgcatttcacttttctttctcttctcacacaagatagataggattttctttcttctgctaccttcaaaacatcacaagaagcaacatccccctatacgagttaggtgagctcagttcaacacatcgtgtgaaaaaaacataaagggagaaaattactattttgtaatttgtatgtgataaagtgcccatcttgatgtatgtacttcttcacttctttgtatgtgtccctagtttgagtgtaatctaaaacattttgaagtgattaaggtgccaagatgtgactatgattgtgttgggtgaaggaacatggtttcatggttgtgttgttgcctttgtgatccgtgagatgaaatgagatgagatgtcagaaaacatgtatcctaggttgttgttttttgaccatacccattcgaagatggtatgggttaagcatcaaatccagcaaaaagatggttacttgagctactcaccaccccttttgtcttcttcttcttcttcttcttcttcttcttcttcttcttcacccccttaccctcttggtgctactttccacaaggaatcatcattgccttcttcaacaccaccaccaccaccatctggcaccagaattagtcctgctgttcttttcatcatagtggttcttgctgttttgtttttcatctctggcctcctccacctgcttattagatttctcataaaacacccttcttctgcatctgctcaatccaacagacaccaagaactttccacatctgatgcactccagaggcagcttcagcagctcttccacctccatgactctggcttggatcaggctttcattgatgctcttcctgttttccagtacaaggagattgtggggttgaaggagccctttgactgtgctgtctgcttgtgtgagttttctgagaaggataagctcaggttgttgcctatgtgcagccatgcctttcacatcagttgtatagacacatggcttttgtcaaactccacatgccctctttgtagaggaacacttctcactcaagggttttccattgagaaccctatatttgactttgatgatctgagggaggatgaagggtgcccttgtaatggggagaatggattcaatactaggcagaaaacagttgtggttgaagaaagtgtggagaaagagaaaggtgttttccctgtgaggcttgggaaattcaagaagctgagtgtgaaggggggtggggagagtgaagtgggagagacaagtagtagtaatttggatgcaagaaggtgttactcaatggggtcttaccaatatgtggttgggaattcagacctaagggtgactttgaaccatgatgaaattggtaaaggtcaagtcacaaggctcaccaaaggaatggaacttgatgatgggaaggtttcagtggaggagggggatgtggaagcaaagaagattagtagtgtcagtaaaggtgacagcttttctgtgtccaaaatctggttgtggccaaagaaggggaaattgcctacttctttggatggtcaatttggcaggccaatgccttcttatctaaacacagattttccaaggatgagggaaccagaaggggcatgaaaggtatccatccacatgtttttactttttttttttctttttcttatttcacttgaattcgtttcaatccattgattaaagctggcttcccccacttgccttacaattccaaaaaaaaattggtgtgctaattttgacattgtgatgactgattgtgccatactattgatgtattatgattgtacttcatgaagatataagaaatactgcatctctttctctttcatcaaacagatctcaggactcattggttagatggaattagatttgtccaaggttttaaatacacgatttctgacacaacattaaggattttgaggtatctgcaaccataattctgactgcaatttgtctacaacttatcttcaatttcatataatatcaaagaacatgaccaaatcactattataaccgcaaattaaaacattagatttgttataataaatgttgatctcaggttatttggttatgcaaagtgcaaacaattagacatatcaagatatccttgctagattcattaactccctagtccaacaattttgtatcatttattttctcataataatgtacaacagacagatctacagtagctgattgaatatggttgtggagtgtagcctgtttcaaagccagacttgtctctttctttgtcattgttctcttgccatcagtgtgtgtatactttgatcatgaggagtggcaagtgcacttgctttcttttctttttaagggttttggttttgtctagtctctctttttctttattatttcccattgcacttacttttttgagagagggtgaaatgtgaattcaaaactttttctttttctttcttctaatatctttttggctaggcagttactgatagtgggatccataaaagctggcgtcatagaatctctttttttccttgtgaggagtcttcttgattcaaaaaaattgctgtggatgaaccgtgtggggccattttacaccccctcccatgtgtacattttgcaattaaagatagatttagattatatcaatcataatgacaatcaattagaccatgttaggtaaaaaagaaaatgataatggatttgctcaattaactactagtcccaaatgattacactttgcttttgaaagaaaataaatagaaaaagtgaaataagagaatttatgtaaagagaaaatagaaagataatgaaaaaaaattagccgttcttttatttgtatgagactacactttc

SEQ ID NO: 271 - DNA, 5533 bp, Glycine max
ttgaactattgttaaaactgagggaagtgtttgaaggttaagtcaatcccactatatagtttgactttaactaagtgctcttgcttttcctaaatggacagcagggattggctgtgactccaaaaagaccttatacacttggtgacaccactggacctgtacttgcacttcctttttccaattttttaacctaacaaaagcaaataccaaaataaagtactctattatagctactatcatttacatctattatcatatcatctaaatacgaatcccaccattgttatattattttaaattcataaaaacattaatttaattttttgatgaatttagggtatctttcatagaatatctggatttaagtgttcctctatagttaagagcgcgtcaatctgaagtcactctttttattatatatattttttgtcgtttttcgcatttgaatgtgagtttaaccgtttgcttgcgttttgaaagccaattcaaacacgcattctgtcgcccagttaaaatacttattttttaaaatactaatatttatttaaaaggttgatttttactataataacaaatatttttgtataaatacaaatataaaaattattttgaatgataaaattatctattaaaatgatgatatatacacgatgtgatcgaggatcccttctgtctgaagcttatttaaagaggcaataatggggcaaagggaaggtcatttgggaacatgagatagataaaataataacatccactcataatatgcttaatgtttagatattgatgtgtgctaagcatagttgaacaaaaacaattaaaatataacattgtcggtggattcatggatttttgatgtaaagccaagctaagctaaggttgacacttttttacaccaacttttctctctctctgtgtacagcctaagcttaagcttatccctccccacttgttgcctctgccgtatgttatagccaaaagggtgtgtgagagagagaaacataaacacaaccaaccatcaagggaagttagagagagagttgagttgtgttgagagagatagagagatagaggagaagatgaacggtggtgaatcttacggtgctattgagacacaatacataaggaggcatcacaaacatgaaccaagggaaaaccagtgcacctctgcacttgttaaacacataagagctcctgttcaccttgttagtttgtttttccatcttaaacttttttgaccaatatcatggttttttgttttgtttttcttctgaattgggtgtgtctggtgggtgggtctgatttgtgtggtgtggtgggaggaagttttttacttttttgttctttggagatctgtgaggctatgcttgttttgtggtgtcttctttgagtttccaattttgtatagttatctgggtgtgtgactattagcatttctcttgtttttttttgtctctttcttggggatgggtggttaactggttattctagaattttggttctgtcagggtgttgcaaaagttggatttttcagctcattagatgatgttttttgttgagttttggcaatattttaaaaatcgtggttgcgattgcagtttcgtcatcattattgctattgcaggcaattgtggacaaatatgactgatgcggtcacaattgctgtcatgatgcacaaaaacaatgatgttacggccgaaattgcggtttttttaaaaccgtgcgttttggtgatgaaatcagttttgagggaaacatagttacataattgaagtttttcttttgtgtgtgtggatttgtttgtcaaattttacaaaagttgaatttttcagctcatgaggtgcgagttttttgttgggttttggcaagattttaaattgcattcgccgctgcgacagcatcaccatccttgctgttgtggaaaattgtggagaaatatgattgatgcagtcgcaagtgatgcagttgcagtgacatcaaaaactttgtcgctgtggtaacggccacaattgcagttacgaagcagttgtgctggcatcatcaattgcagtgactacaaaacattgatgctggttatcggccacaatttcagttgtgatgcagttcaatgactctaaaaacgatgatgttgttggctgtttccttgttttttttttgtgtggatttgtttgtcaaattttgcgtttcaattcttttggttatagagcttgagtggaaaagaaggaaatctgaaaattttacggctggattttggatgcaatacattttgcttagaagctgatgagagtccttcactcatttgagtttctcatctctataatgccctttaattgttttttccttgcagacttgttttcagtagaccaagtaatatgtaacattcttaacttttacaaaattatcttccaattttattctttttaggggactttctattggaatttagtgaaattgaagaaataagtatatgtgatggtgtggtttgttattttgtggattttgtagatgtaaaggaaagaatgattattgtttgatgtggtttggttatttcccttctcaggtgtggtcactggtgagaagatttgatcaacctcagaaatataaaccatttgttagcaggtgtatcatgcaaggggatcttggcatcggaagtgttcgagaagtgaatgttaaatctggccttcctgccacaacaagtactgagaggttggaacaactggatgatgaggaacacattctcggcatcaggattgttggaggtgaccataggctgagggtatgatactttgttgttccttattcggttttatttttctataattagattttgaaaaccaaatattgctcttttctacgaggtcacaatattgtatttgtatatataaaatgtgagtgttgagttattaactgaaagcattcttatctgtacaaacggaaaacaaattgtaatctaataatactactgccttttggaaagcctatcatgagagctaaatattaatggttaaatttggggtgataggaaacgaagcacgtttgaagatattgtttaggttgtgttttagaactttgacaaggatacttcctcttttgttttcttgttaaagtttgttttccagaagaatgtaggagtactgcatatgttagaaatttgttacaaacaataatctgaaatttgttagaaatgttggagatggatcaaagtatcacttgcctgcatatgttattaaattggtataatttttggggattttacttcttttttttataattacatttgacttttctattaaaaaatatttgacttttctattaaaaaagtctttgatcagctctccccatcatgtattttatttagaaaatagtagtagtttgaaaggattgtgcattgcagtctactctttgttgttggtatttactctgtttagtctataatttgtaatgtcttgcaaccttggtttctcagtttaatttgcgtaatgattaccttatttttcaacttcttacaattgtctcttgattttcccaaatatatcattaattggaggattatttatttatttatcaaatcttgcaaatttatggataaaacatagatacagtaccataagtaccgttgctagtgttctttaattaaaatcaacatttgattgtggttagtgtggctgattttaatcattgagatgaaaacaaggattaccaagatcaaatgctgattttaattaagtttgttgattcatttcctatgttgttatgttgtcactaagagatgtatttttgctagctctatcaccaggtttaatactcaatcatgttgtggaatttgcagaactattcttccataatcaccgtccatccagaggtcatcgatgggagacccggtacaatggtgatcgaatcatttgtggtggatgtgcctgatgggaacaccagggatgaaacttgttactttgtggaggctttgatcaggtgtaacctaagctctttagctgatgtctcagagaggatggccgtgcaaggtcgaaccaatcctatcaaccattaagcatgtctaggggagaatgaagttgggttcatacaaattatatgatccattgctctctgatcctagctcaagtgtggacattggttggagtattccttctatgttcccagaagttttggaacttttttcatctgtatcatggatacattccccctaccatccttcttgcatttttagctgtgtaatcactcttttgaactgctaagtgtctcttcttcaatatttgtaagatgagattcagtgcctcatgaaagcacaaggatgtgagggggaagtttttacctgctatattcttcctggattttgtggatggtggtgtgttactatagttatttgtaaatatttttgttggaccaaagacagtttcttcagttttcatgtttcatgtttagtagcaactttttgccagatttatgtgctggcacaaggaaactccaaatagtggatactgccttgttattttctttaataagtagtgtagcttttgtaagaagttatctattccatattctccttgtttaggactatgttcagaacacttaatcaaaatgattttgtttctggctctcggttggtgtcatgcaccttgctgtgtggaatttcagagttactctttcttcatgcaccttactttgaggaactccaaagatacatagtttcttcttccaagtattgcaagcgcttccaaattcagtttttttttgtcgttttgttgggaagataaaaggcttaattgtatttttttacttctaacttttaaatttttggtgaattttatttcaatttttttaactttgcacaatttattttcaatttttaagaaaatttactttttaatacaaataaaaatcgagggcaaaatttgtgggaaaaaaaataaaaagttgtataaattttgtgaaaaaataaaaatgatagtggtagaatttgtcaaaaatataaaaaaaagcagggagtaaaagtataatgaagttaggaataacagaagataaaacttataattttttaaaaagtttacatcaaattaatttaatgaagataaaatttatcaaaattaaaaataaaaagttataattaaaccaagataatatgctactcatacggaaaaaaaaagggtaaaagggtttaaagcaatcggtggatccttaatcctggtggcttctctaatctaaaattcaatcgtactgaaaagaaaagtttggagagttgtgccaatcagaaggattgaatttgcgagtgaagttttcatggtacttttttctctcatatatatatatatatatatatatatatatatatatatatatatatatatatatatatcactttcatggtgtccatacatgagataagattgcatttaataccgtgcagtttaaccggatcacgtttgtaagtgttgtgcctgaaccttgacgttgaggtaacaacacaaacaatcaatactctagaaggttcgtgagttcaagtagggagggggtggagataatt

SEQ ID NO: 272 - DNA, 7719 bp, Glycine max
tatatatgctgatcaaggtcttctgtgtttacacatgctttgaaagggtcctgttcattagagaagtaatgtatctatcgtaatgtttattgatacataatgtttattttagaactgagttataggtgaggggcataatctataaacaattatctttgtttcaaaactctatggcaagtggcatgatctatctataatgatgcttattttaaaatcctttgacagagaagattagcataatctatcgatgactatgtttgttttaaaactatgtgataaaatcaggaaatcgttgtggtttgagtgatagtaaactcaagtttaagtcttataaaagaaaaaaaaaagaaaaaatttacttaaataattagtcagacttttgacagaaattaattattaaaataactaataaatattttatactaaaaaactatacgatagaagaatggcataatctatcaatcaataacaaagtttataatctatcaatattaatgtatatttgaaaactgtaagatagaagagtggcattggactgagtcactttccaataccatgccagattttgtataaaatcaaaatctggctgaaattcatgaaagctgcattacacggttgatgtgtccttacattaccaataatgttgttctaaagcataacacaagctttatgtgttctgatctgcaccacacactgatccatcacatagcatcatagcttctcaataattcaattgcacgttcctggaaacctgtgatgtgaatctcaaccgcacattccctgctaccttatcaattcgtgcattcaactgaagcaatcaaccacacacgtcatgctacttatcatctttattaaccgttcatttccaagccagtttcactcaccccgctgaactcatcacttactggaagccttgttgtgagtaagagaaaaggcttcctgcaccgagcacaccaacttgatacctctgattctttctttgcttagaattccacagaatatggagactgttcttttcaatcactccccacctttggaattcaaggtgcgtagaaatagtgccaagtatatggttaaatcatcactaaaataatcttaataatgggacttgaaatttaattactgtatccctctctacctgtttatgtaattttgtggagtatgtaccctttattttatttttatttatttgatatcatgttcgacccccactttgatggtttgagaagatatctacaaaccacaatgtcatgagaggaattgacatgttatttattatattatatatctgtcaacattatatattatatattgcaactatttgatagttacccttaatagagagattaaacagactcactatacagctccaaaagatttgtattttgtttaataaacttagtaaagtaccatatgatcagcagttattagtaatttgggttagttattgtgctaatatgcatcttgcattttatggggaaagatagaggtaaggcttaagaatttgatatacctttatatggtgggttttttgtcataggcattggctttcattataatatgcattaattttaaaaaattactagtcattttgatgtttcttgttgaagaaaccacatattttcccgatttctggtggatttagtatagttggtcattggcatattctttctgtttctttaaatttgtgacaatttgcatgcattgttacatacaaaagtcgttttaggttctttacattttagtcagtgtttaattgattaatttcttagcatattattcaaactttgttaattaattagtgatcttaagtttgaatatatgaggtttgttactcttgattctagttttggttttgtggctactggaccggtaccatgccttccccagtttgggttctatacttctctccttaagcagcaatgcatgagagaataaggactctgagaaactgatcttctggaaatggaaaaaattttgaactgtgattgcaatcagtagagggaaccattgagcttacatttgctgattatgtatggtggtgattgcaaaaatttatttaatgtaggggaatatttggtgttaagcattgattttagatgtttagattatgtatttaagagaagggggaaaaccaaacaagtagtattgtgaatgttgacaactgtgtaacgactgctagtgaaatcttatttgtgtgatcgatagaattaatttattctatttttaaaataatttattatgaaaaatttgtcgggataatttttataatgaaaaaggtgatttttccttaaaagagaacctggagctgtttaaaaaaaaactcaagacaaatgttatatttaaaagacatgcttaataatatttataataatcatgtcatttttatatttataataatcatgtcatttttcagagaaaatctctcttttagttttttattttattttaaaaagtaaattttgtaaacaatttgaaaaaaaaaatagttattacagattcgtttttcaaacttacacaaatagatcctcaaagcataaaggaacatataaatcaacaaacactcacaatgtttttgcaaaaaagtgatattattggtgaacctgtggcaataacttttcacatattgattattttgagaaagcaaaattttgaccatgaaattgtgattttttatgcatatatgcgaccaaattaccttttcatggttactagaaacccgctcacgggaatgcatgagaaactgaagaaccgattaaaatatgttgttttcttaataactataatgaagtttgaatttaaagttttatacaaactgttcaaattgtatattattagacaggttaagacttttatttattttcttcaaaatatttaatttcaagagcctcaagtagtacgtctcaacaatcaaattaaaaaaaaaaacttaatgtttcaataatattttattttatacaaactatgatgtatacagtatacaataaatacaacacccctaaaatagtgttattaacaattaactatgattctgtaaaaaaaattaactatgatttattacataatactataataaggtcgagtataaaatataatttaaatgagaaaaaattgataagttattcgtttgttttttttttgtaccaaagttattcgtttcttatttctccaaagaaactctattaacaacaaaaaataatcagtaacaatgagttatacatagattaatatgcactttttgctttctagtttcaaataagttttgaagtttctcaagacttgattttgtgggatctgcccctaatttttttatgaatttttttttttttcatttttattccactaagctatcatatttaactatttaatagactttatccctttgaaccatattttttaacatttcctgtttcatcgaatttatagaaacattttttttcaccaataaatgagtagtaaaacttataaattttttcccatttttcatgaatgctatgtaaaagcttcatgtttggttcaaaatgaagcgaagccgaaggttatacggatggaaatatcatcagatcccccaaacacaactttgtaatatattgcctgaatgcctgggtagtgtactactggaattggatagaatagtttgttttgtagtactacatcggaattagcttttaacaagtactcatgtggttctttgcttttaactagttatgctttcttggtaatttaccgtcagaagttattttggaacaaaagaaaaatttgcttaaacatacaacgttttcatttttcttttcccctcacaatatgtttactgtttagagtggtgtgatgtgataatcctagacataaaattatcgagggatgcattatcgtcgtatacaacaaatattgtgttttagaatttgttttctagaaaataaaattacgcccaggattgtcagttttgctaacaccagaaaattaatctgaatggtaaaaacagatgttttacatagacaaactgcctcatttgtttaaagatgaattatgactcatttaatttgtctcatttatttaaaatgctcgtgcttacatgtacagacactattaaatgttatttcacctatattgtataatattggtttgaatactaagattatttttattattttttacataagatttcaaatacgagtttcatagacaaggaaaataggtgttaaaaaagaaacttgtcattttaaataagtagtactctcaattataaaaaattgtaatagtattaagccgtacgtagtacaatgaattttactgattcgcggagccatgttaatggcacactaaagtttcccccatggcagtacgtggcacagcatatgccatccctgggtagcatattatgttaaaattgcttttttaaagttttaacaaattgacccattataacatcctagtgtacacataaacatgaaaaggaagggaggagttattacaaatttttaataataataacattattgatagatcagcaaaagaacaaaaaatattggcatccaatttctaacaatttcatagacaataaaagataaatataaaaattgacggacattgcatgaaattgttctctctcaatttgcagacataaaaatgctaacgcatatctattagttcactatacacaaatttcacgctgctgcatgcgtctctattcgacgtacaatttgtacatttgggctcatgccatgcacataataccattaaaacctttttcttatgtaaactgaacattatgagctagactagctaagttttatactgtgagtcaataaaaaataataataataacttttaaaatagttatcttacttaacgaattatctttacaatcgtttcataactatttacttttatatattctcacatctttgtgacttatatatttgtaatcagggtttgagcaaggaggaggaagactcattgctagggcaagtggaaatatggaggtacatgacatgcttcacggactccgtggccttgaaagctgtcatagagcttcgtatagcggacatactagaccgttatggtaaaccactatccttgtcgcaaattgtggagaacatagaagacgcaccctccccagatgcctctcttctccagagagtcctgagagtgatggtgcgcagaaagatcttcagtgcacaagaatcagagacaggagaaaccctcttcggcttgacacgagcctcgaagtggatccttcgcgacacgaaaatgaccctagcacccatgttgctgctggagaaccacccaattcacctgaaccctgcgcactacatcagtgagattattagagaaggcacaaaaaatggcactgctttctttaagtgccatggacatgagcaatttgagatgacgggtttggatcctgagtataataggttgttcaatgagggcatggtgtgcactgctagggttgtgtccaaggctgtgatcactggctacaaagatgggttcaaccagattaagtccttggttgatgttggaggtggcattggagggtctctttcggagattgttagggcttatcctcatatcaatgccatcaactttgacttgcctcatgtggttgccactgctcctaagttcgatgggatcacccatgttggaggtgacatgttcgtgtccattcctagtgctgatgctatttacatgaaggtatatcaaaaactgatcaataccatatcttcttaaaatgcatgtgctaatggcttataacactctaacacactacttttgcaaaagtgatattcgtacactcataatattagctagttaacatttagtgagtgagagagaaaaataataaaaaatatataaatataacaagtgatatcatgtaattataaaatgagaaaaacaatgcatattaatttagtattttaaaaaataattctagttttcatacataaacataattaaatttaatgtaatgaaattttatatcgttgtattactagtttgaactagtttgagttataatgagtcataaatgcataattatgtacatcttttaaaaaaattgaaagaaaggtataaataactattacccaaggtaatccaaatggttaatataatgatgtaagattttattgtatatatatataagtaatatatttaataaaagaatttgtatttgattttgatcatgtataaagaaattttatatcaacaaaaattatatattataaataaaattagtctctaatccgataactaataacacagacataaaaaaaaaaactaaccactgtgttgaatttaaatcctgttatatgataatatatagttttttatggtatatggtcaagtctttcattacaagtcaagtattttgtgcacttacccttcaaatttttttctttggggtgaaatatatgcagtggattctgcatgactggagcgacgagcactgcatcaagatcttgaagaactgcaggaaggcaataccagagaagacaggaaaagtcataatcgtggatcacgttcttcgacccgaaggcaacgaactcttcacagacgttggcatcgcattcgacatgatgcttctcgctcacaacgccggtggcaaagagaggaccgaagagaactggaagtggctgttcaaggaaaccggtttcgcgcgttacaacatcatcaagatcaacgctctcccttccatcattgaggcgtttccaatctgaagaagatgccactaccacaactgcatgtggtttttatgttgcatgtgttgttgttattattaacagctatatgatcttcgttttaattttgtggttttccttcctgcccttgttatgtttgtgcattaaataaaagtaagaaatgccccaccactaagtaatgctatatggattatgtatgtgttccatatatgtcaagtgagtggtgtgtggttgtgaagaatctattgcttttaatgaatcagatcctttggtgtgaaaaccttgctttctatgttgttgcctctcctcactccataatactttgctcaagttcagaaaacttccacagttcataagttttcagtatttatctgttaatttgttaaataaaataatgtttgattcctacaaataaaaaaaaaaagtggatgtatagaccacataagtcaatatatatgttatctattcccacatatccatcatcagttcatcacataagaaaatgaatagaccacaaaacaccggaaaactttggagtgccgggattttcttttataagaaaaaatttaggaggtgggaatgggtgacccattcaagacaggaaaaggctacatgcttaaagagagagagataccggcatttacctaattgcaaggagatgaatgagggttcgatcttataatctgttagatgttaaaccttgttcccttcaacttttgggttggagtgtcgattttaatggcttattcttcaagacttgaatagatataatttcaagatgagaattaccctacttatatactctttaatttcaggctctttctctctataatagatgtaccacttggaaattttccctatagaatagaagtataaaacagagagatatgtaagttgtatggctatttagtttagttgctgtggcaaggcctgtgtcacttgtgaatcatctttgcctatttatagccattgcccattggttatacacgagggggtgattgcttctattatgttctag

SEQ ID NO: 273 - DNA, 3481 bp, Glycine max
tttcttctcatgtatatgtatacgaaggatcttgagggaggagggggcgggagcaaggcccctaggaatttttttctaaaagtaaaaaatatttaacaaaattacatattaaggtttaaattcagaaccactaactaattgaaacaattatgcatcatcagtactgtattcatacgtttagtggtggaaaaaaatctaataatatttaacggttttattagaactaattctcagggttgatgttaaggatataagaaaggagtattttgattaaaaaggaagtatttatcatacaaaaattattcatttatttttaataaaaaatacttccacttttatactaacataagttgatgttaattaaattgaatattttcgtacaaaaaaaaaagatttttttgacacaaccaacgttttgcaaaatcgcgtagaatgtgtcaaaatatagtaataaatagaaattatggtcgcaataaagttgggcagatacaagacccctccgttttttttttccagaatgctgaccaaaagtcgccgcaaacccactgtgtatttgactctgtgtggtcaaatcaaaggagtatatattaaggtgcacttgtcctataaacgtgttaagaagtcaaagagtcaacgcttaacctcagatcaaagtttaaaagacaggaaaagctaaggaataaaaactagtttaatatctaataatcgattaacaagtcatagttgcagaactatttggcagcccaccaaaattgttttggtatagaaaattacttctacccaaaagtgcaaatcctcctaaatccaacgacggatgagtttgatcctcaaatctatttatataatcaccttcattagtatgatcttacttataacagaattagccaaaccatatctcaaccaaaactattacctctctctcttttctctctaacaaacactccataaacggaaaagaaaagccacacaacaattaattaagttgttaaatttttgtgagatggagaggagtttatcaggaagtagtgaagaggagatgtcaataacgaaaggtccatggacagaggaagaggattctgttctcttcaattacatcactgtccatggggaaggtcactggaactctgtcgctcgctacacaggcaagcaaaacaacatatatttatatttatgtgtttatatatatatatatagctgattaaattaagtcttatgattatcttaatcctagttactcacactgatcacgttttcaactacaggtctaaaacgaacaggcaaaagctgcagattaagatggttaaactacttgcgtccaaatgttcgacgtgggaacataaccctcgaagaacagctcttgattcttgacctccattcccgttggggcaacaggtattatcatttatgtttattattcattaaattttttaggttaaaatattccttggttcatgtaatttttcttatttttagtctcttgtacaagaaaattgtaaattttaatcccttcacatgcatccatgtttgctaaagttttggttcgcgtcactactaacatatatggaagactttttaggttttagtagtataaagcagccacaaacactttctccaattaatataagccgctaaaaaaatgttgtacatacattaaaactgaaaaatgtttgagaaacactcaatataccatcatatacttaatgagaaaaatatagataggaggtaaataaaatctgattaataattatttttatcaagaagcaaactcaaatattattcaaatgattcaaccttaatttcaacagcacatgaattacttatgctgaatcccctaattaggtggtgatttcctgcacagaactgaaacttaagatgaagcaagcaaatagcagtttgaccaatttttaatctgttagtgatagaacttggtaattgaagtgatgttgtgttatttgttttataaaatgaaggtggtcgaaaatagctgaacatttaccaggaagaacagacaacgagataaagaactattggagaacgagagtggtaaagcaggctaagcaactaaagtgtgaggtgaacagcaagcaattcagggacacgttgcgttttgtgtggatgccacgtatgttagagcggatccaagctcaggcctcatcatcatcatcatcatcatcaggccaagcccaccaaaccacgttaatctccaacgctcaagcacacagtgacccttgcggagtcatgacgaccaacccaagtttgttgtcggaggtgtcatcatcagcccttgatgcccacgcgccttctctctatgactctagtgcgtcttacaatctaatgggtggtggtagttcctcatcgtatagtgcagaatattgctactactcggacatagcaggaaatggttttggtggttcggacttgtggacggatgaaaatatttgctttctgcaacagctgctcgctgatcatgacttgtcgtgaaacatgcatctttgttttaaacttaggtgaaattaatttgcatctatcaagtatcaacgtaactattattatgtatacttcaattaatttcaagagaactgctatttgttgtaaatttaatttagcctgatttctaagagataatgatgagtattttaatttcccagaagacgattttgttcacaacaaatagaattaataatagagtaataaaatgtgattcgaaaaaatcatacaaatgcatgagtgtaagtttttgacagaaataacatgtgatgagttgtatttggctggaaaaaaacagcttataaatataaaaaaaaaattatcaatgaaaatcgatttatctctgttgcagtttcatgctcgtgtagtttagcatttttcctaatttttatcataaattttacgctacaaaatgtgaaagagagagatgagttcatgattctagaagaatgctaatggagcctactacacgatatataagttttgctaattctgagagatgaaaagttgggtttgattattattgcgaatggaaaattaatctggaaactagttttctgggagtggcttgcaagtcacggtcttttacacttgtgttatctagaagagaagaacgaaaacgtgacagaggtttgacattaatgaattaagactaggagatattcagtataatatgattcaaattggatgactttgttgttggagctgaggcactaacagcagcaacctttgaaactaaaactttttagttcttcgttttgagatgttcacatgtaactggacagtcaactttcttttatttttctgtcccatgcatggtcacagcacagctgacccaaaatcccgattaatagtaattgctgcagatcttacaaataggcccagatctacacactctaatctatttggtccaactcaaggtcgtacaccaaggaacataacaccgttaatcgtcataaaacctgttgttaattgttaagtaagttgcatcttt

SEQ ID NO: 274 - DNA, 5713 bp, Glycine max
tcgtacgacatcataaataagtattcgtccaagggtaactttaggagttgtgaatattttatattttatatttttctaatattgtgtggtatgatgataaataattttgttttttatgtatgtaaatgaaggttatttttcaggtagggccgtgtaaaaattgattttttttaaaaaaatcaatattgatgcatattggattcactttagacagctggttaatcgaatatctttataaggtgaattgatttttttaaaacagtttttttacaggttttattggtttcaatcatttttggatcggttggtttggctctattttttttttttacatccctaattccaggtatgtgtatttgactttcttgtatttgtaaactgtattttgcgtcactgcatttttagcatgtgttatataatatttatagtttttcctgctttcccttttagcttttatgtctcataaaaaaattattattatctaataattattaaattttaatgtctatgtactaatgtagaacaatttaacactatcattcaattacaaatcaatgtgtgaaataactttttttttctcttattttaaaagtcaagtcaacataaatttatcatacatgataataggttataattggataactatgtagaattatctttgcataacattttttctccaattattactatttttttatagtatggttgaaggaaaaaaatataaaggaacaaaataattacaggggaagagatgagaattaaaaaattatttttctttcccaaaacttaagtattatatttgtcataatttttaatctattgacaattaataacataaaacttttctactaacatgcataaaaaaataattttttttaaaaaaaacattggacatttggaattttagactgttctttgcagttaatctctctctagaaatttccagcaccatcataacacgttctctctctagaatcttctttcaggcaccaaccaactaccaacactaatctaagctcaaaacaaacacaacttcctaacgtagtcacagagtcaaaaacattgtttcacttaaacacattcgcacataaaaagaaaccattaacatttaaccatactactagattattaattactagtacttgtgttgttgtgtcactcaaactaaactaaactcaatttccaatttccttaatcttcttgtgttgatgtgcatggagagaatcagagtgaaggaggaagaagcaatgacatgtggaggtggtggttcatcatcttcaagctttatttctccacaggcacagcccatggaagggttgcacgaggtgggtccccctccgtttctgagcaagatctttgacatggtggaagatccttccacggattccattgtttcatggagcatggctcgcaacagctttgtcgtgtgggactctcacaagttttctgctcacattctgcctcgttacttcaagcacgccaatttctccagcttcattcgccagctcaacacctatgtaagtactcactgtgtgctctttgaaattttttgtatgtaactgttcatgatgcatggttttgtgtctgagttggtgtttaatgtgttttaaggattggttgctgttgtcactttatttatgggatttcatgtgaatgtgtttggataagcaggcgattgtaaaattcaatttggttagagttatttttaaaataatatgattattgtttgaatctttacattattaaaggcaacttgacaagttaactgataattgattatgaagtaacatgatttatgtttgaatcatttcattattaaagacaagttacaagtaaaattcggggtaaacttaaaattgatagcacatgaaagtattagtagagaatctaacataaaattaaacgcacattcattttaattgatttatagggtgtttggttctatctttcatatgttactgttcaccttttggatgtaattttagaagctaaccgttatagttttcacatcccaaacatgattaatttctctatttttaatgagtttttaaacacgcttttaatgttcagcttcctgtgtaatcttaggttgttgaatttttttatctgtttagggggatgacaatttttttttttggagatctaaggaaggggttataggtcttagaggagaatgtgtatttacttagtataattgaccttggatcttttgattcatttttattttctttttgatgagggaccttttgattcatggtagtcacttctcttctcttaccaaacttttgttggttagccttatatatacttcacacgtggctagcaattcacatgacattattgaatgatataagtcttgataaaaattaaagagcgccttggtaatcttttgttttgataacatctagggtaattcaaggatgacatatcatcctttgttctgatagcatctaggtttatgctatcagatcctttgtttgggtagcatctagggttggtgagacaaattttgataattgtgcaatctctgtcccttgtgcatgcggatgacatatcatttaattttaaattgtcaatagggtatcctcaagtagttaatttgtttgtgaacaatatcacgtaaagactttttaccaatgatttgctcaaaaaatatattccgactcctaatttcttgtaataaaatgagatgaccatataatcttaataaaatactactagttaattatataggctccatcaaaattcaaaatcattccatgttcttaaggatttgcttatgccatcattttgtttgattttttctttgattaatcttaatttttcagcccccatttcaattcttatatgagggtgtttgggagaagtaactacttcgaggaaagctctcttagattgtaaaaataagtcgttacttttctaaaataagtagataagatgaatgaaatacacttacatttgaatgatttttcataatctggcctgctgtatgaaatttcgaagaagacaaagattatcaaatatctatgagtttcttcaattttgttttcaaatcataaatattctttaaatgggtcttcaatgtatgagtagatccaaaattgacattgaagcactagtttgatgtaaaaaaattaatattggaagtttattttcatgtatttgataatcaaaattgagtttcatgttttaagattattatttttttcttctgtattctagaaacataagaattaatatggatgattaattagtacaaaagtatctgtttttttactagttagttggacgtgactttgtagaggtgatcacttaccgaatgctttacactgattaattagtgcttacttaaatcattgaccagcttcctcgaactaatttgactaatctttgtcttcccattttgttgtgtggaaaatgtacacaggggtttaggaaagttgatcctgataaatgggaatttgcaaacgaaggttttctggcaggacaaaggcacttattgaagaccataaagagaagaagaaatgtgtcacacagcaatcaacaaaaaggaggaagtggagcttgtgttgaagtggggaagtttggactagaaggtgagttggagaggttgaaaagggatagaaacattttgatggcagaaattgtgagattgaggcaccaacaactgaactcaagggaccaattaagtgccatggaggcaagaatgcaagccacagagaagaaacagcaacaaatgatgagtttcttagcaaaagcactaagcaatccatctttcatgcagcaattagtccacaaaaccccccaaagcagagaagtgttgttgggtgttgaaatcaataggaaaaggagactacctgcttgtccaagtgtggagaacttgcaacaagataatcaagatttggcaactatggagactgatatggacacttttttcgcaccggcttatgataatgaattcggtaatgaaatcgatgagcctgcatcgattttggttgaggattcaatcttggaggactttctcaacaaagacttgattactgggaatccggaggatgaagttataattggtgattgcacccaagtcgatgtgccgatggaggatttggtagcaaaccctgatgattggagtgagcaattgcaggaccttgtggatcatatggactacctaggatccaaaccatagagggatgagaattatactattattgtgtcctcagcttggtctctttaatttcattcacattgcatcatgatggtacaatttggtacttttgttactacttttggttttggtttcaattttatgtgatcttaatgataagtgtgaattgtttttatgcagcagggaaggtggtagatacagaagaagcaaacaaatactgctcttgtttggatcctttatgaagttttatgaatattacttgtgctaatgctacagatcattttattaattatttggatgacctatttgtttgcattttatgttatgcaggagagacaagtgggggcacttcatggttgtgatccaaataattgctgagaaattgtaatggtatcattctgcttcataggatatcattggctggatttcattgttcaggagaggatataaaaactatcatctagttcttctagtacgaatagcctttcagaggaaccacatttgttcccattctttttccttcaaaaaattggatattgttggtgctatgcatggttctttttctattaataagtgaataattgaataaaatttgtctttgtttagcatcttaatatttattctttcaagattagaaattagatgcattgtcgtgtacgaaatacttatcttacatgttagaaaaaaagctttgtagtttgtttttcaaaatgaggtgggggaagttatatatggtttttaagacaacctaataggtgcattaaaaaaaaagaagacaatctagtaggtcatgtatagctacggcaaagtgtaacgatgagtaattttgttgagagttgaacacgcaaaaagaacaattttcgtaggttggatgactaatgttgtatgctagttgtagtgttgtattgaatactttaataaatgaagttataaattactataaatatctataatctatagaatatttcgaatgaaatttttttaagtgagttgagtttcttaaattatttttttagtctctatagtattttttgtggtgttcatagtgttatgttattataaaaaatttatacctaattttactctaatgataagaaacttcaagaaatttacttttatatttttttatttttatttaattatgatttatgtatggtattgttatgcgtcagataaatatttttttattattaagaaataatttatcacagaaaatacaaattttatttgtaagaaactctttctgccacatagatttgctctaatagacaaggagttgtaagaaatattttcttcacttaagaaactcctcaataaacctccattggaggcagtcaacaaattataaacatgcatattcgtacaaatttgaggtgtttgtttcacttataacttttttagttttgaaaatattatttttgagaataaaatatatacacgttattcttgggaatttaataaaaaaatgtgtttgattaattataacattagttgagaatgttttttatattctcgaaaataattaagacatatgtttggttaaattat

SEQ ID NO: 275 - DNA, 2153 bp, Glycine max
tgataatcaaacttaagaatagtccaaaaggagcaaattggggggatcaatcaaaagaaggaaaccctagggaaggagaaaagggcacactttggctgggcctgtcaatttccggcccccactttgaaaaggcttgtagaggacgcaaaaacttcctccaatcccaaacgccacctcgttcctctactgggtaagttttcattttccaaattcactcattctacctattattccgcttccatctctttgaacatggaccgggtcagataggtttaaagtttttggtaaatttggtgcctaagattacgatgggtaactgttctacgtgttacatgctctctctctctctctcactgacacatcttaagcaccaaccaatctccttccttatttattacttataagcatacacgcacgcacactcactctctcatctctacttgaccactctctctatatatacaccactaaaccctttcttcgttctcagttatcttctttcacttcacttaacctagcctccttcccattctgatttgagttcttgctttgcctcttaattttatttttcctcttagctttcttcgatcttaacctttgaacagtaattgcttgctttgtatacattaattactataggtggtactttggcagcttttctattgtatagagacttatcagtgaataatactactatgtgggtcttgtgtttgttttgttggcctacatatacacatgggagttgaggagccttttaggccttagccttacattagttgtccctctttccttgcctttacttttgcttcatatattggatttgattagatttagggttagggttagggctgttctattctcctcctcctccttttctacttcctgatatgcttcaattcctcctctctctctctctctcttgaagttttatgttttatggccaagtgatcttaatggtggtaacacagagagacctaatgaagtcctaaataaactaaagaaatcagtcactgtttgccggtggagcatcatcaagattcacaagctttaggggcattaatttgtttgaggtggttccttattgctccaaaaccaattagcccttttgctatgggaatcttgatgatgctgcagcagcaataaatgactaatactactaccagatattgcttgaggaggatctcactactacacaactgtgctacaaggccaggagcaaaggaggttatttaattaactaaataattatgttattaatttgttttctaaatattcaagaaattggattaggtaattaccaagttacaagccacttttggatttacctttattaactctagtagctgataaatcatatatatcttcaacatggatgtggttgagtactacttcagggtccttgtggaaattttcaatcaagtgcaggtgaaccacgcgttgaatgagacatcatagataatgatgccattaattggcctgtgtggtattgcactttcttgtgccattttgaggtttaatattcagtaacgatggagcttagtgctcttagtacctttatggaatttgcagtactgcaaaaccccttctcatctgcaaagctcagtaggtatgtctgtacgttgatggaacattgtgtactacaatggatcattgaatgccttttacttcatggacattcggggtcactgtagtatttatcttttctactcttctgttatattatatactcatattattaatcccgttaaaaagtattttttgtatattcattttaatcttgtgtgtctatatatatatatatgtgtgtcccttaatttcagttttggcatgagcagcagctttttacttttacacgatgtgtgtggatttttgtttattttttttgaaggggatgtgttaggaatatcaatattaatattatacacatatttgcactttcagtactgctcttaatattgtcaaggaaaaatgtagattagttactcctcagatttatacctctcttttaactggatatggtgctgtttttactttcttcataaagtagcatataaccagctttatgtgtgaatttggctcttttttcttattgatattgaaatgctgcaagatttatttctctgttttttagaacaaattgtatgtaaatatat

SEQ ID NO: 276 - DNA, 6633 bp, Glycine max
atttttaaagaaaaataaaataaaagtgaaaatacattttcttaaaatttagaaaatatacataaaaacagatcaatagtaaagcaacgttttcaatcttttcttaagaagtaaaaatacggtgacactttgacattttttctcaatatattttttaaatcttaaaaatttaaaataaaaaatatttttaaaaaataaaaataaaaataaaaaataaacactcaaactaaaataagtaaaagttttaattttcacaatgtggcgcattaagactctcgaaatgctatttccaaaaagaatggtagctgactagatgcaatctctcgtaggcgttaggttggcaatggaaggtttggttgcacgcttgcacgccccatgtcagctgataacctactttcttagagtaacccactttccatattcacaaatgattaatggtcaatcttctaattcacgcactactcaccccaaccatccattaggatattccgagtctaatggctccattattaaaaaaaaaaaatctttttatttaaattttaacttttcatttttatatatttattcttaaacgaaaaatctaaactactatatttgattcatattctttatttattttttaaaatttccccattgtttaaattttttaaatcaaaatcaaaatcatttaagtttacttaattttaatattgtatgaaataattaaaattaaaaaaaaatgtttttttaacaaagtaaaaagaaattataatggtgatagaaccacgggaaagtatttgtgcaaaataattgaaattacaagtattattttctattacaatttttttaattgtttctttgcttttttttttttttaacttctattttgcaagcatgtattttatatttaatgtgtgtggagggggacggagtacaaactcttttttgtctatattcagtaaaatgttggtggagacgtgccttgcgtgatgaactaccatttcaaacaccacacgacaccacacatccattttaaatataaccccatcatagatatcccgaatcatcaaattattacttcatagcaactagcaaattaattagcttcaccatggactcattgttacttctaaaagaaattgccacttccattttgatcttcttgatcactcgtctctccattcaaacattcctcaaaagctatcgccagaaactcccaccggggccaaaagggtggccagttgtgggtgcactccctctcatgggaagcatgcctcatgtcaccttagcaaagatggcaaaaaaatatggacctataatgtacctcaaaatgggcactaacaacatggttgtggcctctactccagctgctgctcgtgccttcctcaaaacccttgatcaaaacttttcaaaccggccctccaatgctggtgcaacccatttggcttatgatgcacgggtaggaatgcagcaccttcatatttttatttattttaaacacaccattaatgtcacttattatatataactatactttctttttgtttttctctctcactaagtgctaaatagaaataaattaacttatgaagaggttagattcggagaattcttataaattaactttacataaattaattttaatttataggagaaatttatttattttcttatttttttctcctataagtatttattataattttattcaaattagcgcgtgtaaaaaaaaataaatgaactgatccaaaattgaacaaaactctgcttcgaaaaccgaacctttttaataagaacggttaggttttagagtggttcaacttgtttctattcaattatttaattagaaaaacctatccatatacagtatagaatgaataattgacactaatggaaccaaaccgaagctaataaaatgtaaaccattttgaaaaaaatttaactaactcactttataaaaaaaaaaattgattaaccaaactgtttttatgaggtgatttgtaaatggaccggtttggatttaaatacaaaccaaatgtttcagggtcttaatccaaaaatgagattcttaaaataagtgaattcttctcttcctctatctatatgtaataatttttctaatatattaaaatacgtagctttataatttactaagataataacatatgtatatcttttcacttttggctattttggatccgtccttgttgacaggatatggtgtttgctcattacggatcacggtggaagttgctaagaaaactaagtaacttgcacatgcttggaggaaaggcacttgatgattgggcccaaattcgagatgaagagatggggcacatgcttggtgcaatgtacgattgtaacaagagggatgaggctgtggtggtggcggagatgttgacatattcaatggccaacatgattggccaagttatattgagtcgtcgagtgtttgagacaaagggttcggagtctaacgagttcaaggacatggtggttgagctcatgaccgttgctggttacttcaacattggtgacttcataccctttttggccaagttggacttgcaaggcatagagcgtggcatgaagaagttgcacaagaagtttgatgcgttgttaacgagcatgattgaggagcatgttgcttctagtcacaagagaaagggcaagcccgatttcttagacatggtaatggctcatcatagtgagaactccgatggggaggaactatcgctcaccaacatcaaggcactactcttggtataacgctttttatcttacttctcaaatgtgtcattttctttcttcatttttattagacaaaaaaaaaaaagtaaaatatttgttatatgaggataactaccatggaggatcacttatggtatccaacgttgttaaataaccgttataatccgccttaacgttataatgtggcatttttcaacccctctgcccatagacagtttgtgagggaggcccgttatgacggcgccatagggtgcaatggcttcctaatatggagaaattttagccttctgcatatgtcgtcatctgtcattgataactttggtgtggtgttaacaaaacaacttatatagttaggataggtagtaaaaagaaagtgttatttccatatttttcaaaccccttgttatatatatatatagtggcggacctacatgagtgataaaaaaatttattctcttcataaaaaagtgtaggagggtacttgtacctccttattttttaaaatttattaaatttataaataaaattttatatttttatattttattttatctatatttatataattgaattcattaattttattttttataatttaaactccctaatttaaaatcttggatccgcctatatatatatatcaatcgtttttttacattttcaagaattatattaaaaacttcaacatctttaattcaaaaatgctatacactttctaattcattcttttaaacactttctaattcatttttttaaatatattattattgactaaaattgattgtaaatcatacattggttctattttttttattgaatgagtctcacttgttctgtggtttctaacatattttaactaatatcaaagagtaggtacgttgagtgtattgttggttcaattcttttctttttataaaaaattttgatatcataatatttgaaagttttgtttaaaataatcttccctctatttgtacataattatagcatgtttgttttggcaaattgaataaaaagtgaaaaatttggaagcaatataaaacttcgttagaaccattaaaaaaacataatcaatttcccttcgccacccccacacacatacatagtaaatttagtcctacacatcataacttattttgcctgaaaaatgttgagttaatttttatgacttgaagtgacaaaaatacgttcaaaatttgtttatattgttcaaactataaatttacaattgaaccacaaagaaaaaggatttccgtatgacaaattaaaaattaattgcgatattgcatagttaactctactatatctgaatttttatttgttttacaagtacaacttgtttatgatataagtttagctataagccaagtaagtacactttaaatttagccaaaaaggaaatgggcagtctgtatcataaattttcttagacggaaatattaaagtacaagctacgaatatatcgtatatattgtgtgagatcaacttaaattaatcatgatggaggttaaatgctgcaattaaattaaattcagcgggcctctcccccaattatttataccaactttttgctgcatttggaattggggccacggaaagtaatgtcccaactaagaaaatatcttctcatcatttggtattgtacgtagtgaatcacattgactatatatcatgtattaaatctgatatgagaatatttattttccatcttattttctatatgcataataatattagtttttgtctagtatatatatcacatttttaatacataaataacaaatttagtcaacactttttttttaaaaaaaaaaagacctaaaattttgtttacactagaaactaaatattaattgttgtgactaaattacaatgtgaatataataataccatcataatagtgttcaattttaacaaaaaaatctatgttatatatagtgcaaattcaacgaatcaatacaaatcatattttatataaaaatttattgatgatgtaaatgttagtgcaagttattacgatgataatttaatccctcgcctcataatcataccacacaccaacattttctagcttgagattttgttctaacaactatatatgctattttgttccagaacctattcaccgcaggcaccgatacatcttcaagtataatagagtggtccttagccgagatgttgaagaagcccagcataatgaagaaggctcatgaagaaatggaccaagtcataggaagggatcgccgtctcaaagaatctgacataccaaagcttccctacttccaagccatttgcaaagagacctatagaaagcacccttcaacacccctaaacctgcctcgaatctcatctgaaccgtgccaagtgaatggttactacattcccgagaacactaggctgaatgtgaacatttgggccataggaagagaccctgatgtgtggaacaatcctttggagtttatgcccgagaggtttttgagtgggaagaatgccaaaattgacccacgtgggaatgattttgagcttattccatttggtgctgggaggaggatttgtgcagggactaggattttgagcttattccatttggttcactacattttgggcttattccatttttgagcttattccatttggttcactacattttgggcactttggtgcattcgtttgattggaagctacccaatggggtgagggagttagacatggaggagtcctttgggcttgccttgcaaaaaaaggttccacttgctgctttggttacccctaggttgaacccaagtgcttacatttcttagaattggttgggttcgaatattcaccagctatgttctctagccttattttgttgtccaatgattttgtggctgtggctacataaataagtaatgtttgggttgcacaacctatttgtatttgtaaggttctatgttacttggaaatccgttaccccaccacctgcaaggcttagatttttattcttcatggatctctaatttagctgtcttgttttggtttaattatatttttaattctcactcatattttaatttgtgggaaattttatagtattttaaattttaattctttattctttatttttataaaatgtaattttaatttttctatttttattcatcctcaattttgatcctctcattaaaaattgagatatgtaattcctctaatttataaaattcataattttgacctttcaatccaaaccaatgtgttgacggttaaagttaacattgatctgttgatagctgtattttttttaatgaattgaaatgtgtgtaattaaaaaaagttatctttcaatggtgattaaacactcaatttttttgtatgaaaacactggtggctttcttcatgtttctttggttctagatctgttatctcttttgttaattggcttttttcttctcaaattaaattttaaaaaatatcacaaattaacaagcataagaaatgtttgagaaatgcattaaaatgaagttgatcgtccccggtaataattaggtgttcaatggcaagaaatggaattataagaattgggcactgaagctcaaaaaaaaaaaatgcttgtagcattatatataaacaatcacaattatagataattagctagttatttcatatgcgcacaaattttcaaatgaagaaaatgttttaacaaaacaatatagcagaacacacaaatgacgacgggtagctaatgatatttgaggctggttttggtttggcacttaaagtggaattaatgactgcaaattgtgaagtcaacgttgtagatgagggtcgagtttggattcgccgcttacgagattagttttccgtgtcttttttttttaaaaaaaaaaattaaatacatttcaattcattaaaaaataattataa

SEQ ID NO: 277 - DNA, 3451 bp, Glycine max
acatcgaattttaaattgcgggcaagatatcttgttaatttttggatatacgtataaggttatttgattcaacatccatccttaatatctggtcaaaattttggccatttcttttggcaacgtagtattgctcataacaaaatgagtttaattaaggggaggatcttttataagaaatactgcaagtgttactatgttagcctttggaaatcagagttctttgcaattaatttttaactgcaatgaattattaccactaattattttttgagaaaattaccactaattttgtatacattgtaaattcaaaaaaattgaatgctgaaagcataattgcacaatcttattaatatacggtagttactcgtttcggtctcgaatgtaaaaaacgaaattccttattttcttggtctaaaagtcaatcatcttattggaaggtaatgtaaaaaatttctacaatgcgatacattctaattaaattcttaagattataagatttttttcgttgtttattaagattgtaatattacacgcacagaatgattttattattttttagcatgtgccatttacgattgccataaatcagaaagacgaactcacgattcacgaagatgaaattgccgtgagtcgtgacgatgtgacgccctgcaccaggcaccagctgcctctactttgaaaccaaaaaacagttaacccctcaaaaaatgaactggcaaacccatgcactaatgtgactagggaattcatttactttaattaataatttagtcgtttataataaaatttacgtggtccatcctaaaaggtatcgaaaaggtgcttttcctttattttaaaactcacgcatgttggctcgccactttaccaaaatgtgatgttgcatccaattgtcaagtggctgtcattcacaacatgcataccctatttattaatcgttaattggaaaagccaaaacccactactatactgctttgcattgcatatctctctcacacttctctcccatattcaattaatcaatatggcttcatgttttccaaatgcatctccatttttggtcatgctcgcaatgtgcctcttaatttccacctctgaagctgaaaaatatgtggttggaggcagtgaaaaatcctggaagtttcctctctcaaaaccagattcactcagccattgggccaactctcaccgatttaaaatcggcgacactctcagtaattactctccatattatactcctttctttatttcctatacatatatgtctcatgtttggtgtttacttagtgttggaaataaatctatgtcctacgtcgtacgtcaaccaaaaatagtgatataaaagagcttataaaactaagatacattttcatatgattacttaaaatatattttgtaatcttgactattaaaatatgacggtgtatatttactgtcattttcatttttcacgttaactacgtattttcacgagttactcctcatacaatagaataatcttaatcatccattccattttgaggtaagctgggatggagggaggaagagagggattgagagaaaaagtagaaaaagaaagtaataaatataatattatgtgatttatatgatagaaaatgaagagcaataaaaaaaaaatatgaaagtgatcgagttgggagggaattagattaattaatgttgataatagtaagcatgcaagttatatatataaaatgtaccacatcttaatttttttgactagtattattaatctgttaaccgtatgatgagtttttatttctttgtggcattatgtatgcattttatgattgttaaaactcattttttgttgctgtttttgtatgttatacacagtatttaaatacgaaaagagaacagagtcagtgcacgaagtgaatgagacggattatgaagggtgcaacacggtggggaaataccacattgtgttcaacggtggcaacaccaaggtgatgcttaccaaacctggattcagacacttcattagtggaaatcagagtcattgccagatggggttaaagctggctgtgcttgtcatatcgtcgaacaaaaccaaaaagaatcttctttccccatctccttcgccttcaccgccaccatcatcgttgctatcaccatcaccttcgccacttccaaataatcaaggtgttactagtagttcaggtgcgggattcatcggggttatgatgtggttgatgttattgctttaaattgagagtattgtgtattcgcaattttgcatgttaatgcctccgtcactaatcactatatatgcaatatatatatttgtggttgtggggttagttattcaggtcaagcatgcattttcgctttcatttttgtaattttttttaaaagtttggacgttttcttttgattgcgcaattgtgcccttaaactcaatgcccgtcttggtaattttgagattgaataagtcatttggatttttatgcatgtgggtttgctgttcctacgtatgggtgtaaataaatcaggccggtctacagaggtctacgacttgacctacataaaatctgaccatttgattaaaaggttaggctcagacttatttaaaagtctattaaattaaatagaccaggtctaaacttattaaaaagccttataaatctgataggtcggcctatatatatatatatatatatatttatattatttttagataccaatatataatattattttttggatacaattaatttttttttgaaactatcagactttgattacacatggctgctataaccaagtaagactttaattacaatttaggtgtcactcatgtgtccttttatatttcttattatttttattgactttccttttcttttaactttcttattacattcctacttcataaaatattaaatatttatttgaaaaaggcttttaaaaaggttatcaggccacaccaagcttttaaaaaatgacagttcgaggcaaaataaaagtctttaatagactataggtcagacttaggtctttcaaagcctgacctgccttattctcatcccctatgtcattattgttgtcaaatgaaataagttcactgcttctcactattgtgtattttactattacgcatttaaaataatttccacttatgtgcatgttttttaccctgctaaatgcatttagacggatccaatgctttagtttattaatttgcccagaaattgtctttaagtatcaattgattacttattttattttattagtacaaagtgctaaaataatgtcacttggtgttcattatattattggatataaaatattaacattataaaattaatatataaaatttaaataatgaatattgaaacataatttaagctaattaaggaaaactttctttagttttcttagttaatacagtattttttaactttatagtttccgtaccttcaaatct

SEQ ID NO: 278 - DNA, 3908 bp, Glycine max
ttgagcagggacatatgtacattaacattctatttgattgtgagaaaagaaatagagtttttgaaaataacagaaataataagagaaacaaaatgaaaataaagttaaatgctaagtagttgggtcaagagaaataagtaaaaaataaaattaaaattatttggtttgaatgaaatgagaggagaaaatttaataaatgtatggaaattatgcttacatctttggcaaaattgggaatatgggtatgctttgttaccaaaagaaacccaacaaggatacgaaggtaaaaacatattgtgttcattatttactcatgcagagctgctctagacaagagagagtcatttaccaaaaaagaaaaacgataagagagagaaaatttatttgtaggaccctctaaaaaaaaattaccacctctcaaccaaatgtttgcataaaattttgtcgtggttctctaccaaaattactggcaccacacagacgctaaacattgtggggggcaaatatatatataaaatttgtctccaatatttaaaatacagtaaaaaaagttaatttagtataagtattgattctataacttaaaatttctaaatctttaacattatagttcactgtttccagccttgattgtgacaggatcctcctaataagatgaccaaagtacctaacagccaggtataaagaaaattaaaaaaaaaagaagataaaaactacctcctttttcaattatcatctagctgtcttatttaattacaacccttagcttattacaagggtattttggaaacatgccataagaatcaactgaccgtaactgaatctcaagtgaaacaaggttctaggagacgttggattcttaggaaaccatcaaactccaactcttcaccctaaagattgaattgacccaagtaaacatattttctcaccaactcctataaatatcctcacaaaacttcaacctttccttcatccaaagctactccaattcctttattgtttattgccacctttcgcttataagttactactttgaagatggccaaaggaaatagtcccctcgagaggcctagcttggcttcacttgaccaaaaattggccttcgctaagcgctgttctcatggtacatataagcttttacttccaatttttatcctaaaagagaatgtacattgtatagcaaattctgtgattccatttttcttttcttttactgagcagaaattatgttctcttgaaataattgtttggcaagaaacgccataactagaaacataatatagaatgagaaagcatttatagtgaatttggatatgatttctttaaaatcaacgtacaaatgtataaaatgagaaagtattaattcaaataaaatattctgtaattttaaagaataaaaagtgcatgtattaaggttttgtcagatacccacatcaaccaaattaagtatatagctaggtgaaggataacttctatcttgcaaaataatttttgttgagaacctcaaacccacacaagatagatattttattcttaatacgatttatttctttcataactaaagatcaattagaaattgaatcttgtattactccattaaaaaacacatactactatcatttctgtgaatagttgttagtcccgtccatgccttcgtctttattcattgatcgatatttcaactatttctgatatgatatggaccgctgaggagtgcatcaaaattaagatatataattgctgaaaacttttgccgatttcccaatctgatattattactaatttgatttgggtttgtttaccttttctaattttgtgtaaacagagggtgtgttagcgggagcaaaggcagcagttgttgccagtgttgcctctgccattccaactgtaagtatttctccaacctctatattcagttcattttcattcactcaatcctaaaagatcttcttaataagatcaatttacaaatttacatttaaaataacgaccaagtaggattattattctattcagagagaaatattaacatcacactcttacacattatttttattatcagtcaaatttattagaaattaaaaaaaatattagtcttatattttatttaacaaggcgcattagtgaacttttaatgtctaataaattttaactaataataaaaacataccagagaatatcttgataacaattctgattctactaaagattttttgctgaagagatttttattagaatagttatgcttggtgtgcagctggctagtgtaaggatgctgccttgggcaagagccaatctcaatcacacagctcaagctctcataatttccacaggtttgaaagcactgtgatctcttaataatttgctggaatatatgaaaatacataatttgttttagtttttattggaatttattcttttagtattctgcgtttaagtagaacagttcatttttattcgttcaccaaaaactaaaaaaaatgtttttttgtaaaacttttaagactaaaacaaaataaattttaagatttattttaaatactgaaaattatttccaccattcctaacttcacaatttgattgcagcgacggcagcagcatacttcatagtagctgacaagaccgttttagcaacagcaaggaaaaactccttcaaccaaccctccaattctgaagcatgaatccgaatggatagcatggacaatagtcgattataccacagtatccaaccgtgaatcggtgttatttatccaaataaataatgtgttcataagaatatttatgtacaaattatctgaattaatcatttatttcatttcagcattaatcatttacttcctaacagtgcactatcaaaacatggtacaaccaaaaatttgacaaacagtgcacccaatagggtgtttagaatccaaattaatccctaattcaatccgacccaattatattaacttgaatcttttaaatgtttggatcaaactttcaatttaattataccatagtatccaactgtaaatcgatgttatttatccaaataatgtgttcataagaatatttatgtacaaattatttgcactaatcatttatttcatttcagtactaatcatttacttcctaacagaatagatcaaaacatggcacaatcaagaatttgatgggataatttataaatttgtaacgttaaaatagcacaaaaatactgcatccaataggatgttcagaatccaaattaatccctaattcaatccgacccaattatattaacttgaatcttctaaatgtttgggtcaaactcaacccaatttaattatacgacaatatccaactgtgaatcggtgttatctatccaaataatgtgttcataagaatatttatgtataaattatctacactaatcatttatttcatttcagcactaatcatttactgcctaacagagcgcgaccaaaacatggcacaaccaagaatttgacgggataatttgtaaatttgtaatgttaaaatagcataaaaaatactgcacccaatagggtattcagaatccaaattaatccctaattcaatccgacccaactatattaacttaaatcttctaaatgtttgggtcaaactcgacataatttaattataccatagtatccaattgtgaatcggtgttatttatccaaataatgtgttcataagaatatttatgtacaaattatttgcactaatcatttatttcatttcagcactaatcatttacttccgaacagagcacgatcaaaacatggtacaaccaagaatttgatggaataatttgtaaatttgtaacgttaaaatagcacaaaaaatactacacccaatagggtattcagaatccaaattaatccctaattcaatccgacctaattatattaacttgaatc

SEQ ID NO: 279 - DNA, 5728 bp, Glycine max
aacttagtaatgtagggatcgaacataaccacttgcgatgaataatttgctttaaatttttgttgatgcgtaccctttaactgtcactcatggaatacgattcttcaatatctagtgcttgatcgttgacagaacaacttaaaacagagaattgatgttttggcttttccatggataataattatcccagtgacataccaaagcatagtagctaagaagactttcacgtaaaaaaaagtttcttttattcccttttttaatttggtgaatcacaaaaaaccacttttgtttggttccaaagttaggctcatggaaagtttaaacctccatagaatggtcacgaagagattgcatctttgtcttcacaaaagctaactccacgttgagtagacttaacagccagtggcgaatagcaaggatatttcattaattatacgccaccggccaaatgttaaccaatcgtattataattaagttccatcatcatcaaacaatttagtaaagtgcatgacccaaatttctacgatacatatttatttattaaaaatgtaagaatatttcagtcatatttaaaaatatatatatcaagaataattaactttgtacacacgcactgaataaaagatttgtgacagacaaggcttgcataaaaatttctcctctaaactaattgcttgtaggacctctcccaccactatagaatcaatataattaatccgcattagaaagttatattgtatacaattttcttgaaacataattatacttcatgtttcacagacttatagtggatcttgtgtggctagctactgatgaatattgttttttttttttcctaagcatccactttgaacaacttttcccatttcatacaaacagaattaattagtattgcgtgccaccatatggtacagtgttgtacatgcatataagctatttaatttaataatatacaaacataacggtgtatataaatagaggcagcatgtggtgtgtggtgtaaaaataaggacgcaggcaaatgtatgcatttggcataagtatataagagagagggagtagtactactgcaaagcaaaatcagagagacatgagaagctgtgtgtgctacacgctattattgtttattttcttcatatggctgcgcgtggcaacgtgctcttcgttcactgacatggaatcgcttctgaagctgaaggactccatgaaaggagataaagccaaagacgacgctctccatgactggaagtttttcccctcgctttctgcacactgtttcttttcaggcgtaaaatgcgaccgagaacttcgagtcgttgctatcaacgtctcgtttgttcctctcttcggtcaccttccgccggagatcggacaattggacaaactcgagaacctcaccgtctcgcagaacaacctcaccggcgtacttcccaaggagctcgccgccctcacttccctcaagcacctcaacatctctcacaacgtcttctccggccatttccccggccaaattatccttccgatgacgaaactggaggtcctcgacgtctacgacaacaacttcaccggaccgcttcccgtagagttggtgaaactggagaaattaaaatacctgaagctcgacggaaactatttctccggcagcataccggagagttactcggagtttaagagcttggagtttttaagcttaagcaccaatagcttatcggggaagattcccaagagtttgtcgaagttgaagacgctgaggtacctaaaactcggatacaacaacgcttacgaaggtggaattccaccggagtttggcagcatgaaatctctgagataccttgacctctctagctgcaacctcagcggcgagattccaccgagccttgcaaatctgacaaaccttgacacgttgttcctgcaaattaacaacctcaccggaaccattccgtcggagctctccgctatggtgagcctcatgtcacttgatctctccatcaacgacctcaccggtgagataccgatgagcttctcacagcttagaaacctcactctcatgaacttcttccaaaacaatcttcgcggctcagttccgtccttcgtcggcgagcttccgaatctggaaacgctgcagctctgggataacaacttctccttcgtgctacctccgaaccttgggcaaaacggcaagttaaagttcttcgacgtcatcaagaatcacttcaccgggttgatccctcgagatttgtgtaagagtgggaggttacaaacgatcatgatcacagataacttcttccgcggtccaatccctaacgagattggtaactgcaagtctctcaccaagatccgagcctccaataactaccttaacggcgtggttccgtcagggattttcaaactaccttctgtcacgataatcgagctggccaataaccgttttaacggcgaactgcctcctgagatttccggcgaatccctggggattctcactctttccaacaacttattcagtgggaaaattcccccagcgttgaagaacttgagggcactgcagactctctcacttgacgcaaacgagttcgttggagaaataccgggagaggtttttgacctaccgatgctgactgtggtcaacataagcggcaacaatctaaccggaccaatcccaacgacgttgactcgctgcgtttcactcaccgccgtggacctcagccggaacatgcttgaagggaagattccgaagggaatcaaaaacctcacggacttgagcattttcaatgtgtcgataaaccaaatttcagggccagtccctgaggagattcgcttcatgttgagtctcaccacattggatctatccaacaacaatttcatcggcaaggtcccaaccgggggtcagttcgcggtcttcagcgagaaatcctttgcagggaaccccaacctctgtacctcccactcttgcccgaattcctcgttgtaccctgacgacgccttgaagaagaggcgcggcccttggagtttgaaatccacgagggtgatagtcatcgtgattgcactgggcacagccgcgctgctggtggcggtgacggtgtacatgatgaggaggaggaagatgaaccttgcgaagacgtggaagctgacggcgttccagcggctgaacttcaaagccgaggacgtggtggagtgtctgaaggaggagaacataataggaaaaggaggggcagggatcgtgtaccgcgggtccatgccaaacggaacagacgtggcgataaagcggttggttggggcggggagtggaaggaacgattacggattcaaagcggagatagaaacgctggggaagataaggcacaggaacataatgaggcttttaggttacgtgtcgaacaaggagacgaacttgctgctgtatgagtacatgccaaatgggagcttaggggaatggctgcatggtgccaaaggagggcacttgaagtgggaaatgaggtacaagattgcggtggaagctgctaagggactgtgctatttgcaccatgattgttcccctcttatcattcacagggatgtcaagtctaataatatattgctggatggggacttggaggcccatgttgctgattttggccttgccaagttcttgtacgaccctggcgcctctcagtccatgtcctccattgctggctcctacggctacattgctccaggttccattcattattattttctcttttccttcttcataatcttaatataccatgcagataacgtacaacatgcatacttatacatataattttatcctttcaacatataatcaaatatttcatatctaataataccaacttcatattataaacatcacctaatataatcaacatgacttgataaataagacatataagttcaatatttaaactcatgtgtctgaaaaaacattaattggaaaagtcactcttaaaaatatttgataatatatcaatatgaccatatgattccaattacgatcacaaactctgttaaaaattcttgctgaagatattagtccttgaatactaatataagaatatcttgggttagaaaagttactattttactgttaattcccgtttactttagatgggttggaagttgaaaagttgagtgatttaatttgtttctggtggttgcgcagagtatgcatacactttgaaagtggacgagaaaagtgatgtgtacagctttggcgttgtgctgctggagctgataatagggaggaagccagtgggagagtttggagacggggtggacatcgttggatgggtcaacaaaacgagattggagctcgctcagccgtcggatgcagcgttggtgttggcagtggtggacccaaggttgagtgggtatccattgacaagtgtcatttacatgttcaacatagctatgatgtgtgttaaagaaatggggcccgctaggcctaccatgagggaagtcgttcatatgctctcagagcctcctcactctgctactcacactcacaacctaattaatctctagttaattaagttatttgctcatcgatccagaatcacttcttttcaaaataaattaacacagacgaaaactgtaggaataactttcatctgttgtttgtcggaagtgaaacaacgaatcaaatgtgaactatgtatcaaatgtaagataggttttaattaattttgtaatattggtgtcaactgtcaagtaattcgaaggattttccccattgtgcatgtatcaagaatttttgtagaaaagacttgttgtttataaaatatttgtgactgctactgtttcttctcccccagagtccataatttataattgtgtctgtaatgtcgttttgccaaaaaagttgatttatccttgttcctgtctaggatttatctactatttaccgtcacataatcggagagtacaatcttaaataaaattattctaaattcatgtttttgtgagtgaaaaataaatgttgaaattaagaactttaccttttaaatgaaatatttaaattaactcaactcaaattagctgcatctaatatactttttgaataatgaagatttaaggaaagagacacacgaagtttttgatgaaggtatcaattttatttgaaattatttaaaatacaaggttttttttttaatatctagtatataactatacatttttagcataagtatgaactactttgtcttaaagacataaaagagactaaattcgaatatatatgaagcgtaaagtactacaaatcttgtgtgacaatatttggtcattgttgatatatccatattattcggcgccttaccttttaagaaaaaaggagatgcaaagttacttaaattaaataattagttttcctcatttggagatggatttttttaaatgccaatagttttgatatctaaaaacaagttatgattttaaatgtttggtgtccaaactccgaatcacttgtaattaaaacaaaatttagagtaaaaatattatttaattttttaagaaaatcattctattttagtttttaacgatttttttttaaaaataaaatcttaagattacaaatgtgagacatttttattctccctccatttcaattaataatttttggaattaaaattagtacacattcattttttttaagaattattctttacttaaaatataaaaaattaaaatatttcatatttctaattttgagaaaaattttaataatttttttata

SEQ ID NO: 280 - DNA, 3672 bp, Glycine max
gataattagcatcagccataacactaacgctataagagtttgtcaggccaacgttagctaaacacaacttttcgaataccattttgtttcactttttattttttaattaaataacattgaccatgactcactatatttttcggaaagtattttttttttgtaattagtgttgaccttagtgacactaattatgaatttgagaggtaaaacaaaaagttagtgttggtctggcgttggaccacaacctgcagtaaataatactaccttttatttttatttataccattcaaattagtagtaattgtttcttttgtattaattatttccaactaaaatatccataaataaattgtactaacaattgattataagaaagatgattattaaggataatgataattttaaaaatataaatttaaaatatttaattctatcaattaaattaattattattttaatcataataaattagataatcaaatcttataaataattagcgtcagcttgactgccattgatttgtgagtaggaaagtaaaaaagttagcatggaccgtgatagtgtctaccactttgaggattgaagtaattatttaatgaaattaaaataagcccaacaacaacaattaagataaactttaatactattatatattatagaaattgagttatacttaaactggattttacagataagaatgagaagcataaaaatgggaaggaaggaagtagatattaaagcagaaacgtcagcagtgatgaaaacatagcccctctgacgcacagaatgacgaagacaaaaagcggattcctttcctatataatataataatagacaatgagcaccgtgcaatcagcaaccaaaatgactcaagcccagattcaaccagttaaacttggaacccaaggctttgaggtactattaactacattacttgctcttattttgataattgatacaattaatctcattctaggtttcaaaattgggattcggatgtatgggccttactggagcgtacaatgaccctctccaagaacaggatggcatatctgttatcaagtatgcgttcagtaagggaatcacattttttgatactgcggatgtttatggagccaatgctaatgaacttttggttggaaaggtacaaaccgtttcttttctgttactttttactgtttctgtgttttgtaaacctgcttttccttctatttgcagtggaaattttgacccattttaactaactaaacacactattttagaacagagatgtttttttctatcacgacttttgggacaatttttgttatcccttttgtttcccagggaatatttttattaaaatgattgtataagaaaaagttaaataaatataatcatataaagtgtcacacatgtcaattatttgatgctcaaagacttcaagtaatgcagcttatcttgaaattgattgtatgcaaattttcttttattaatgacttatgactcggtggaatcagttattgattttgtcatttttttattctgtctactaggctttgaagcagctgcccagagaaaagattcagatagccacaaaatttggtattgcttcacgaggttttcctgatatgaagatcaagggttcgcctgaatatgtgcgatcatgctgtgaagctagcttgaagcgtcttgatgttgaatacattgatctctattatcagcacagagtggacacatctgtacctatagaggaaacagttaaggatttcttcctctcaatgattttgatcatagtagactttatatatatacctgtgaaaatttagtaatataatgatattatctggcttatctcactagatattagatatgttattaacgtttgttataatattataggtgggtgaacttaagaaattggtcgaagagggtaaagtcaaatatattggattatctgaagccagcccagatacaataaggagagcacacgcaattcatcccatcacagctgtgcaaatagagtggtctttgtggactcgtgacattgaagaagagatagtccctctctgcagctaaagcgtgtttatatgatttcattcataatcaaagtttgaatacaattagaaaccaaataaaaaatatgtcgactaacataaaatttagaattctttgataaacaatggataacttaatttctaacacaaacggctataccaaagatatcctcttggtcgtggcttttttggcggcaaaggagttgcggaaaatgcctgcaataagctccctggtatatagcaatttggcatgtacataattctgctgcataccatggaattgttgataatgacaaattatcaaatagcaatgatcaattctcaatcttgagtgaaacattggttggtttgttgtctgttaattgcaaatacttgtgtgtttaagctgaagtagtgaaccatatttgtttttctccataagaatataagattgtacattttcttttggcaaagaatggaagatgttgtttctgagggttatttcaattatcagaaagcacatccacgctttcaagccgagaacaagaatatatatgaacgaattgaaggccttgctaagaagcatcaggccactcctgcccagttggcattagcatgggtacttcagcaaggcgaggatgtatctgatactcactagtctctgtctctctcagctagtatcttaggtatcaatagttttgaaaaaacattacaaaatattgacaatttaataatattaattaaattaactaattttctttaaaaatgtgaattaattaaaaatatcttacaaaaagcaaaagagaaatattaattaaaatttattacaaatcatatttttatagatcttattatatatttattgactttttctgttgtaatttttaataaattttaactactacatgttttctaatttttaataacttttgtttactgcaatgataataattttaaaagttggaaataataactgaagaggttgattgtaataataatgattttaaaagttagaaataataaccgaagagtttaactgtaataataaaaaaaatactattaggtaatgagtttgactgtaataataattttttggtctttggtctttaatacattttttttatcattcagaatcagaagaataataatacatagtttaataacagcataaaagctttacacaaaaaatagaatcaaatgtaaactccattgagatttaccaatatccggaaaaattgtttagcataaatctctaaggttatattcacatgagattattttaaagtaaataattcattttaaagaatcaagttaataattttatatatcaataaaaaaataatgattgattttatattacattatacatacatatatatatatatatatataattagtatataattataattaaggagtttagtctagttaattaaacatgtgttgagttagtgtatactctcttatacttgtctttaatttttatgaataaaaaaatataacaaagtataaataaaatataatattaatcattaatttttttaaagaattagtaaagtgatataagattccgtagtttcgttacatctttccaaatgtaaaaataatctatttaattgaaaaattcatatttaattcttattcaataataatcaca

SEQ ID NO: 281 - DNA, 4035 bp, Glycine max
ttattattacgtcacccattttatatgtttttgtgagtataatctgtccaaaaatacattgaatggaaggcaataaatatccacttaaaataatattttttaagacaaaataacatttattttatcttttctcttttttatttatatggattctatatcattttgtgtggatataatttgtctaaaaatataattaatgaatgaaagataataatgatccacttaaaataatattctcaaaggtaacataatttttttatattttattttcttaattaaatagaaatatatattttttgtgtgaatataatttgtttaaaacatattgaatgagaaaccataattaatgatccacttaaaataatattttttaaggtaaaataatattactccagtcacctctaacatattatgaagtatttcttttattttgagagctggggataatatctctctgtcaatacatgcatccaattacctttaacagagtgacctcataagtcatttattttatgtctttaatgagtgttaactttaactccactgaagaatcttccacgtcatccatttatgaaaccctttaaacagccatggccccacctcactatagacaaacaaggaactgtgggagttacgaaaagaggcattgttctcctactgcagaaaccaccattgcaatttgcaccctcattctcacgttacacacactctgcttatattgtagagcaagcatggcttgaagtttgaacccatttactgtttttctgatgcagttagtttcaaatgggcggctttgatatggccatttgtcacaaagaaacagaagatgactgatttactctctgcaaatccaccaacgtgtcatccattgcatgtccctgattttacgatggtccatgcatgatcacaaaattacaaaatagaggtccctgatattttacccttcagtttttttcttttctttttgagctatataaaccctaccctatacactgtaagcaaccaccagaaactctcactagcttagtttctatatatgcgttatttgtctctgagtactttttctctcttgtgcattacctttgtggtcatggcagcctccgtggatcccctagtggttggtcgcgtgatcggcgatgtggtagacatgttcattccttcagtcaacatgtccgtttactttgggtcgaagcacgtcacaaatggctgtgacatcaagccatccattgccatcagccctcctaagctcaccctcaccggcaacatggataacctctacacactggtattcattcatgtttctgttgagagatctcacatgcatgcatcaaggtttttcttaattttatgctttctctttttctttaatgtgcctacaggttatgactgatcctgacgcacctagccccagtgaaccaagcatgcgcgagtggatacattggttagtaaatttgttttagttcttcctattcttagtttctaactccatatatataaactgatatgatcttgctgtttccacttattttccaggatcttagttgacatacctggaggaacaaacccatttcgcggtagtaaaagaaatcttttggtctacttcatatatgacatttttattttcttctatttataaaagtttcatgatgttgcatgcatgagtactactgggttcagttctacttaattaatttttcttttcttcgggctaaaacatcatgttttttaattttttgggcgtccatcgcactgactctcgatttcagaaacatttttcttcactggtcataaaaatcttaggccatttctggcaaaatcaacatgcatgttcctacctaggctcctcgcatgcatgtttcagatttcttctggaaaaaaaaatcacagaatttcagggctatgtcacatcttgtgtgcacactctctttctatacatcaaatggtactctcacacctgtgatctaccaaaatttggatccaatgtccaccatcccccacgtgtcctgcttgtgcctgctatgaacacgtgtcacaacaaatattccatctctaaattctctgaaataatcgttaaataattgttaagtatagtaaataaataaattctcaattattctgtcatattttctctaaaaccattcttcaataaattaattttagattttctccgtgcatgcaccaatttagataacatgtgttagctagggaatctccttttatgagatcatcacacgtgccccatagcttgcatgttatcaaatttcagaattccatcacaagcaaatgtgtcaaacatgaagcaatatttctccaactccaaagtaaaaatattttgaattatcacctttctttggtcctgtcatttctaaaatataatcttcgcatctagcatacaggatattagattaatttttcctactttcaacagttaacattgatttcttgtaaacaataataatttgattcatgcggaacaaagaaatctaataattaatcaagtaaatggtcttctttgcagggaaacaaagaaatctagtaattaatcaagtaaattgtcttctttgcaggaaaagagattgtttcatatgtgggaccaagaccacctattggaatacatcgctatatctttgtgttgtttcaacagaaaggacctttaggtcttgtggagcaaccaccaactcgagcaagcttcaacactcgttattttgccaggcaattggacttgggacttccagtggccactgtctacttcaactctcaaaaagaacctgctgttaagaggcgctgaatctagctatattgtaaccatcagtgtctctcttgagatatgcatggttggaatatacttttaagatatcagaactatataaaatctatgactagtgcgtaaataatgcagggagagggtgtgtgtaaagtaatatagttgtccaagacatgagtggtgccgaccatttccccggctttgataactttttttctctatatatatacctctctttcactctatcaaatatataaagttaatctttattaattgttggtgtgcttcactgcttgtgtatatgtatgtgtttatccttccaatttatccttactgttgtgggtacgtgcaagtctgttttaattataatgatataaaaatctaaaataatttactgttatgagtcatgcaagtctgttttaattataatgatataaaaatctaaaaaaattggagacaaacttataaatacaaatataggaagaaacgtaaaaagttgaatttttaaaaggatatttattatgatttacaagaattgaatctcatagcaataataataataataacaagcaaattaaacttttctcagtaactatcattctttacctgaattatcagattacatgggaaattgtattcataaatttgactgattgatgatgcaatagaaataaaataaaataaattataaaaatgattacagaatgtattgtttcataatataatcattttttcaagtaaatataattatctctttaaattttaagacttgccaaaaaaaattataaataaaatatttttttaattatcaccagaaagagtatatatacaaaagtgttttcgtgtaaataataatatttatgtaaatttaattttttttatgacagacatgtgtgtgcaaatgagttattcatgaatcattaatattaaacttataaagtctggctttggtttagatgaaaatggttgcctagaatgatactcatatctggggtgttaattctagtagctagtcatgtttttagatgaaaatggtttgccttgttaatttatcaaatgtctattaattctatatattccttaacatgtatatacattgaaaataatcattctaagcaaatcaatctagcttcaaattcaatacaaaatgtaggtttgataacattaattacatatgcacgtcatgccagcagacattaaataaatttttcgactaaactttcatatatgaaattatccttattaaatcgtaatgaaactagatagatgaa

SEQ ID NO: 282 - DNA, 5564 bp, Glycine max
aaattaaattaattaatttctacttttatttaaacttttatctacttatgaattactataatgtggagaggtaattaaatgtctctaactctttttaaaaaagaaaatgtctgtaacttaatatcctattcctattaaaaacttccaatatttagtaaggcaggaattataaaagcacaatatatttgagagttttgagcaaagatgaaggaagcggaaataggataaatgttaaatcatacccgctccttcctctctctctctctctctatatatatatatatatatattaatgttttgttttttaaacagttgatgttttaggatttcaaagcttaagtaatgtacttttctcagatgtatctttttttaatattcactaagtggtataaatattaaaaatcaagctatcaaataaagatattttagtttaaatataataattttaaattttattaaatatttaaaatctatatatgataaccctaaacatcaatttttaattccattaaatatttttattctcagatgggaagggaagcaggactatcaatgaatcttcatactccattattactgcgcgcggtttagtgttttaatgatattattattaattgtgtgttctcattgaatagaaatttgtttgtagaaagaagaaagaggacgtaacgtaacattaataatttaagtcgataataaaagaggagtgtagatacaagtatggaggagagtggaaataggaaaaaatagcttagagagatttatttacgaacaggaagagtcacatggcatgtgtccagtcttccacatgataaatacccttcttaccttccttactaggacttttgactctctctctctctatctatggtagtagtagtagtagtattcattcattctctctaatggcagagctcacaccctaaacacaaaccagagcctctgagagaaacaaccacaaactctcccttaatcttgtcggtttccatatctgctgaaaatgaaagctctgtacagaagctctctcttgctcttgctcttgctcttcatctccgtgtgttttgcatcttcttcttctccggtcactcagcaactcctaagcttcaaaaactctctcccgaacccatccctgctccccaactggctccctaaccaaagcccgtgcacattcagcggcatcagctgcaacgacacagagctcacatccatagacctcagctccgtccctctcagcactaacctaaccgtcatcgccagcttcctccttagcctggaccacctccagtcactctccttaaaatccaccaacctctccggtcccgccgccatgcctcctctctcccactcccagtgctcctcctcattaacctccctagatctctcccaaaactccctctctgcctccctcaacgacatgtcgtttctcgcctcctgctccaacctccaatccctcaacctctcctccaacctcctccaattcggccccccgccccactggaagctccaccacctccgcttcgccgacttctcttacaacaagatttccggccccggcgtcgtttcttggcttctcaaccccgtcatcgaactcctctctctcaaaggcaacaaagtcaccggcgaaaccgacttctccggctcaatttctctccagtatttagacctttcttccaacaacttttctgttacgcttcctactttcggcgagtgttcttcgcttgagtatttggacctctccgctaacaagtacttgggcgacattgcacgcactctctccccttgcaagagcctcgtttaccttaacgtctccagcaaccagttctccggtccggttccttcccttccctccggttcgctacagtttgtgtaccttgctgcaaaccacttccacggccagattcctctctccctcgccgacctctgctccactctcctccagctcgatctctcctccaacaatctcaccggcgctcttcccggcgcgttcggcgcgtgcacttctcttcaatcccttgacatctccagcaacctcttcgccggcgcgttgccgatgtcggttctcacgcaaatgaccagcctgaaagagctcgcggttgcgttcaacggcttcctcggtgctctcccggagtctctgtcgaagctctccgctctggagttgctggatctgagctccaacaactttagcggctcaatccccgcctcgctgtgcggcggcggtgacgctgggattaataataatctgaaggaactttatctgcagaataaccggttcacgggttttattccgcccacgctcagcaactgttcaaacctcgttgctttggatttgagtttcaacttcctcacggggactattcctccgagcctagggtctctttcgaatctcaaagacttcatcatctggctcaaccagctccacggggagataccgcaggagctcatgtatcttaaaagcctcgagaatttgatcctggatttcaacgacttgactgggaacattccctctggcctcgttaactgcaccaagttgaactggatctccctctccaacaacaggctcagcggcgagattccgccgtggattgggaagctttctaatctcgccatactcaagctcagcaataactctttctccggccggattccgccggagctcggcgactgtactagtttaatatggttggatctgaatacaaatatgctcaccgggcccattccgccggagctgttcaagcagtcggggaagatcgccgtgaatttcatcagtgggaagacgtatgtgtatataaagaacgatgggagcaaggagtgccatggtgcggggaacttgcttgagtttgcggggatcagtcagcagcagctgaacaggatttcgacgaggaacccctgcaatttcactagggtttatggaggtaagttgcagccaacgtttaaccataatggttctatgatatttttggatatctcgcacaacatgttgtcagggagtattcccaaggagattggggccatgtactatttgtacattctcaatttgggtcacaataatgtgtctgggagcattcctcaagagcttgggaagatgaagaatctcaacattcttgatctgtcgaataatagactggagggccaaattccgcagagcctcacggggctttctttgctcactgagattgacttgtccaacaacttgcttaccgggacgattcctgagtcgggtcaatttgatactttccctgcggcgaagtttcagaacaactctggtctatgtggagttcctctgggtccgtgtggttcggagccggcaaacaatggaaatgcgcaacatatgaagtctcacaggaggcaggcttctctggcggggagtgtggccatggggttgttgttttccctcttttgcgtctttggtttgatcattattgccattgagaccaggaagaggaggaagaagaaggaggctgctcttgaagcctatggtgatggtaattcccattcgggtccggccaatgtgagctggaagcacaccagtactcgggaagctcttagcataaaccttgcaacatttgagaagccgctccggaagcttacttttgcggaccttcttgacgctaccaatggttttcacaacgacagtctcattggctctggcgggtttggggatgtgtacaaggctcagttgaaggatggaagtgttgtggctatcaagaagctgattcatgttagcggacaaggggacagggaattcaccgctgaaatggagactattgggaaaatcaagcacaggaaccttgttcccctgttgggatactgcaaggtaggggaagagaggctcttggtttatgagtacatgaaatatggaagtttagaggatgttctacatgatcagaagaaagctgggatcaagctgaactgggccattaggcggaaaattgctattggagctgctaggggattggcttttcttcaccacaattgtatcccccacatcattcatagagatatgaagtcgagcaatgtgttacttgatgaaaacctggaagccagagtctctgattttggaatggctaggcttatgagtgctatggatacacatttgagtgtgagcacattggctggcacaccggggtatgttcctcccgagtactatcagagcttcagatgctccacaaaaggtgatgtctacagttatggtgtggttttgttggagctgctaactgggaaaaggccaacggactcggctgattttggagataataatcttgttggatgggttaaacaacatgccaagctgaaaatcagtgatatttttgacccggagctcatgaaggaagaccccaatctggagatggagcttttgcagcacttgaagattgcggtttcctgtttggatgatcgaccgtggaggcgtccgacgatgattcaagtgatggcaatgttcaaggagattcaggcgggatccgggattgattctcagtcaaccatagccaatgacgaggaaggtttcaatgcagttgaaatggtggagatgagcattaaagaagcccctgaattgagcaagcattaggcattaaagtgtcgtgtggattctttgggaaacagacaagaagagaggaggagatgacggattcagctcccctcagttttttccttctttgccgcttcaaattatttcagacataagggaaaacggttaaaaggggaatgaatgcttttgatgtatgtattcttgttattttatacataaaaaaaagttgtttaacttgtatataaacagcttcagttgttaccatctgtgttttcctagaattttcaaagtacttttctcattcaaatataatcctgaaaaggttctctgttcaatctgcgaccccagtgatggcaactaagtggatcaacagcaacttttgctccgatttgcgatataatttgtcaaaacatgcctctaaaatcactctaacatcaaatttcttgaataacaattttatacactcccctcctccaacttgttatgtgcccttctgacccttcttgttttgtttgctagttaaccatgtaggaaaaagtatcactccactcaatagtattttcacttcatctggccataaataattttggcctaattcagcatcacgtatcaggagtcaataagcttgtctgtccgtctgtatttatcatctctcttcgtgctactatcacctccccttttcttatggatttttcctgttaaaaaacaaaaaggaacaggtaacccacttgaattaggacaccaatgtaggtgccaccacccgtttccttctgttgagtgtgcacgcttattggttcaacctcagaattaaattcttcataatcccctgttgagagaaaattataatagacaaatcaaattgtgtggacttgccatttcccaaaacattttcattttgtgcgcgtgtgggtggtggggtgcgttttattagaatgaagactgtaaaaaagaggagtgtaggatgataagaagtagtaaatgtcagttgtcaaaagatgaaaagcaacggaggaagggaccaaaccttgacctatggaaa

SEQ ID NO: 283 - DNA, 4012 bp, Glycine max
ttaacattatttttctgtttttggccattggtccagtgttgtttatgtaggtctgtgaagaaacaagtatagtagagcttttaagataccctcttctctcaaggctttatattgaaaatctttgtcacataggggtgtagtcttcattgcacacgcatcatcactagtcctcccgctgcctcacaaagtacaatttgaaaagctctacttcctgaaatgcctatagaatatgcggaccaatgcacaacacaaaaaataaatagccctgatggaaagggaaattcgatctaaatctacatctcatcttttaataagtgtatgtacggaaagaggagagatataaaaaaaataaaataatagatataataaattacttatttgatgaaaaataaaagttaaaatataaaaagagaattgaagtaaaagtgagatggaaaaaaaaaatggatgtatcaccaattgaccataataactctatatgcttcatgcattggttgggacccatgaaatgcacaataagttcacaaatacatttttaccctccaattcatcaggtaagtacagaatatatatcttggtagcttgctgattcgacttaataattatagagtaagaatttaaaaaaaaaatgtatgtgtgtgtataggggccatgtctgatatctccatcaaaagaagaacctattgaactcccaaatcacaacccgcatcattccattgccattcattcattcattcagaaaatctactcttttttttttctttccttccatccaatatatcatttcatgcctcatttttctaccttttcccactgtctctgtgtgcaaatactttatttcacacatacctggtcatgccttttcgtccaagtaattcctgatagtaccctcactttctaagctctcttttgtcccttccctttttatgaacaccactctgtcaccctcagtccttctctctcagatatttatttatgattttctctctttatcactccatgtactatatgtgcctgtgcctcatctatcatctatcatctatcatctatcatcacctattataagtttataacccccctcaccctttcctccccttcataattcatgcagtagtaatctctcttctcacctatataccctctaatattctaattctctctcttgatccaacaaacaaacactaccattttgtttgttctgagtagtgatccatgatggaacctcaacaacaacaacaacaagcacaagggagccaacaacaacaacaaaacgaggatggtggcagtggaaaaggggggtttctgagcaggcaaagtagtacacggtggactccaacaaacgaccagataagaatattgaaggaactttactacaacaatggaattagatccccgagtgcagagcagattcagaggatctctgctaggctgaggcagtacggtaagattgaaggcaagaatgtcttttattggttccagaaccacaaagctcgagaaaggcagaagaaaaggttcacttctgatcataatcataataatgtccccatgcaaagacccccaactaatccttctgctgcttggaaacctgatctagctgatcccattcacaccaccaagtattgtaacatctcttctactgcaggtaggttaaccaaaccaaccatatacttatttacctctctcacttcttatctctcaagttattttcttaactttgctccttttaggataagtaaattaaatatgtcttattcttatattgtggccatgtttgtgtatgtagggatctcttcggcatcatcttctgttgagatggttactgtgggacagatggggaattatgggtatggttctgtgcccatggagaaaagttttagggtaagttaattaagatgactcctaatttggtttttatggacatgaaagatgttatatacaaaaaaaattataccctctctcccactctaatatgaattcctagctatatatactttctcttttatcattgctcagtgagcatatatgtaactttgggatgcattgaaatggaaagcaatatccatgatccatgacatgtgtagtgcacaagtaagtgatagtctactatatacccacgatatattatttaagaacaaaacggagcgacaatccgtcttttacactattcaatccttgaaacttccataaatggaagaaccccaccggtctcttgactctcttctataacgacaaagcaatgtatgtataaaggaaaacatttcatgagtaaaacttatatatttctcttgagagagagggagtatccaaagttcaaacaaggagttcactagcttataagtagatttagaaatcatttcataatgaagtgtttgattaattcttaattaattcattttgttttgaacccttttaattaatttcttattaggactgctcgatatcagctgggggtagcagtggccatgttggattaataaaccacaacttggggtgggttggtgtggacccatataattcctcaacctatgccaacttctttgacaaaataaggccaagtgatcaagaaacccttgaagaagaagcagagaacattggtgctactaagattgaaaccctccctttattccctatgcacggtgaggacatccatggctattgcaacctcaagtctaattcgtataactatgatggaaacggctggtatcatactgaagaagggttcaagaatgcttctcgtgcttccttggagctcagtctcaactcctacactcgcaggtctccagattatgcttaagatatatcatatatatactcaacttattaattataagatgataatgatagccttgcataatttggttatcatcctatgattaattgtagtttatatattagactctgtgtgtttagtcagttatggttttatataatcagtgtgggcaaatgtaatggtgtgtactcagtttaagagcctttccctacctgacacatgtcatgcgggggaacttaatggactgactaattaatcatagttatgttattttgtccacctctctctccaacattctttcattacttagctaactgaaatgattggttcagaaaaaataacaataatgatgatggaagttaagtttatcccaaaccattaccataaacataaaaaaaaacaaataacacttaatcatatgcaaccgaccctctcaatattggcttggaatggaagatttaagtgtctctctaatcaactccttatccatttttagtttgtttccatgacatattcaacaaacaatattatcctaatcagccagttcaaaacctgtgaataataaaaaaaaaagtcactccgtcattttctatgaaccagtgaataatgaccccttttttttcttaaaaaaaattagcttaaggtacataataggagtgtttcttgtattgttaattttttacataatttgaatttttaattatttttctcataagtgagatttttcccggcccttattagcatttaatttgagccccgaccgttatgaaattctcttccaacaattaatacatgaacacgaattaatgccagtttctcatgattgagatttatttaatgtttattaagagagaataaactcaacatttgaacacgacatacataaaacaattcatttttctgtaaaaagaaaacaattcattttgtagtaagagtagtatacttttgatattatttttaggaattagctagcttgcgggtatttctatataaacaaaatttaaaagaaataagcataaaaagtatttacaaaaatatcttaaggagattgattaaagagtatttgatatgttatgtaattttaaaataattaaaattatttttcatattatactaaattgttttacttattgaaatatatatatatatatatatatatatatatatatatatatatatatatatatatatattattcagattaaaatatactaaagtaaatacttgttaatttcttaggaa

SEQ ID NO: 284 - DNA, 3695 bp, Glycine max
  modified_base (3263)..(3695): a, c, t, g, unknown or other
ctttggtctgaatttaagagttaagtttttattctgaaatgacctcttaggcactcacacacttgtactctataggcgtgtctagccttgagcatttgtggtggagttcctttaattatgccatctttatcacgaatcttccaacacaattaaaagaaagactatggctctgagggaaaatggagaatcacgcacccacaaacagaaatgttgcacattgtgtgcatgcaattaaggaaggttctctacgcaaggcatacaacaaaaatttctgcacgtccatggtactaagagaatgctaaaatgtgggtgttcaagaaacgaagcacttcctagagttgttcccttttatgcttttagtttaataatgaaacggcagaagcttgacaacttgcaaagggagaggacccacatacacatgatgcttttttttacctgatcgagctgatgggaagaaaaaaaatgggaagttttgtatttttttaatattttttacaattttttttagaactgggatggatgggatggaattaaaaagaagtacactgtaaaagggttgttattagaataaaaaaaaattgctttattggatggaaatatccatgcatccattcctgtgtacagccaatcaattaagaaccgattctaatggccccattctgtgtttatgaccaggggagagaggaaaaggggaaaggataatttgtcacatatcatgactaatgtgatttcagcacaaacatcccagacccaaaatcaattgttgagatgagccaaattaagagataatatattaggggtagtgggaggaccttcacggatgcacttgatttatttgtaggcttttttcattttttgtttttcctgtagaacatgtttttttctctaaatctaaagaatgtgttgcaacatcttttaaaggaggggggaaaaacactctaccttgaaagacactttttaagacattataaatatagagctcacactccctttcctcagcaggattcatcataacaattgtattcctcccttccttagctccactacctcttctctcttcctccttgttccttcctcttacaatggcaagaatgcctttagagcctctaatagtggggagagtcataggagaagttcttgattcttttaccacaagcacaaaaatgattgtgagttacaacaagaatcaagtctacaatggccatgaactcttcccttccactgtcaacaccaagcccaaggttgagattgagggtggtgatatgaggtccttctttacactggtactatatatatatcttttatctcctctcttattccttttctctttaaagaacaaagttttttgggaaaaaaaagagaggaaaaacttgagctgttgccagtgtgtatctttgttgtttcctgtaattcagctcacacagtaagtctcttttggagttttctttaccaatactgaatcattaagctaatgtctcgcttttttggtgcagatcatgactgaccctgatgttcctggccctagtgacccttatctgagagagcacttgcactggtacttaatataaagattaacttaagtagtcatttattatattaatgatcatacacacacatatatagctaccggtttctcttaacaactcaacccaaacgaaaattttatgatatataatactttaaaagttctgtatgtactggttatccatatgacattcacgttagatgtctgtattttattatcaagtttgaagttttgcaagatatatgcacccctttcatcacatcaaactatggacaggtaattaatatataaatacttacatcacatatgaggaaggtacacacatgcctttgtattctgtaagagttgcatgctccatcatcatccgttctccctaaaatcaaaacaatctaaaagggtgaattgaataaatataacagaactacatataaggaaaactagctattcattcataggtatctaacagtaaaaaattttgttgcatacattctttttgctgcaggatagtgacagatattccaggcacaacagatgccacatttggtaggtttcatatgaaaaatgtgttatatgggaattacttactctgatgatattgatgagagagtgacaaaaaacatgatattcctaataattttgtagggaaagagttggtgagctatgagatcccaaagcctaatattgggatccataggtttgtgtttgtcctgttcaagcaaaagcgtagacagtgtgttactccacccacttcaagggaccacttcaacacacgcaaattcgcagcagagaacgaccttgccctccctgtggctgctgtctacttcaatgcacagagggaaacggctgcaagaagacgctagctatagctgctgattttgccactgcttcaaccaaactagtattgtattgtattgaataaagcgataaaaaaaggtacaagtacaaggagtttcagtagtggaattaagttgatcctcacatgtggcttcaaataacttgcaggaagggaagataattaatcattttctagtttgacccgtgtgtatgctacgttttattttactttccatctgttgtgtaaacattatactactacgtgtattattattacctcgtgggactactatgaggtgtgatcttatatatagaaataagaggtttggtacgcaattgtcgtttcttttactttaatagtttagggtttagcttcgtttcttctttcctttggtttgtcattgcgggtttcaatcactcagcaccttctctctattgtttttttcgatctcttcacaactaaattacgtttttaacagaaaaagtatcattatttaattactatatgggactttatgaaattatgagtgacctgtacacacttgcgatcttgtcgtgttgattattttttctccattcagatgtgaaacctttcatattatttttcagtaatacgaggcttgctcatctatataatatttatgacatctgccttttgctaacttgatggattgacccttcaggaaaacagtgatttctacaccaaatttccagttaaaagaacttcttttcttatcggcactgctaaaattaagaacatgtgagatagtatatgtattgccaatagtgtgtttcgaaaccgttagtttgcactcttttaaatgaaaggtgtaatcgttccaatacactaaacatagaagctgtgaaatcaaatgaggttacgttgaaatcacacatttctacnnnnnnnnnnnnnnnnnnnnnnnnnnnnnnnnnnnnnnnnnnnnnnnnnnnnnnnnnnnnnnnnnnnnnnnnnnnnnnnnnnnnnnnnnnnnnnnnnnnnnnnnnnnnnnnnnnnnnnnnnnnnnnnnnnnnnnnnnnnnnnnnnnnnnnnnnnnnnnnnnnnnnnnnnnnnnnnnnnnnnnnnnnnnnnnnnnnnnnnnnnnnnnnnnnnnnnnnnnnnnnnnnnnnnnnnnnnnnnnnnnnnnnnnnnnnnnnnnnnnnnnnnnnnnnnnnnnnnnnnnnnnnnnnnnnnnnnnnnnnnnnnnnnnnnnnnnnnnnnnnnnnnnnnnnnnnnnnnnnnnnnnnnnnnnnnnnnnnnnnnnnnnnnnnnnnnnnnnnnnnnnnnnnnnnnnnnnnnnnnnnnnnnnnnnnnnnnnnnnnnnnnnnnnnnnnn

SEQ ID NO: 285 - DNA, 4236 bp, Glycine max
cctctttacaaacatacaagtcataaatagaatataaccacctccaatgcatgaccgcccattaagaccactaaatacatgtttgggtaagcgtcttagaagtacttctaggagaaaaaataaataaaatgagattttctataagctaatgaactctctcatatagtttttctaaaagatgagagttaggacatatacaaattagctaatgaagaactaattttatcttatggagaaactaaatttttttcttcttattttcttgttttagaagtgtttctaaagaaacttatcggaacatgccctttgagaagaaatagcttctcatagtaaacttagtttgtaatttattgttttacttccaagtttaaagaaggattgccttgcttctaacataattctagtagccaagaaaaagcttgagcaaacaatagcataaggttgtgtgtgtttttgtgcataacaaagcaatatttttcgagagttactatttaatccctcttctatcgtgactctttggtctacctcaagcttgaattaacataatgatttttacataaatctcaaaacatgggttcgcaaggtgtcttacttaatacacaggacgatatatattactgtaactatgctaggtttatagaaatgtgaaaatttcataaatacaaaacaatatcaatatcatgcggaagctaaacaattaactatacaaatataccatacattttatataaggaaaaatccagaataaatatgaataattttaaattgttaaaaaaatttactatttaaatttttattttattcttcccgggaatagttccaagtctatacataaaaccaaaaagattattttctagacaacacaggtgggaatatcccttcccctcgtccttcactctgtataaatagctagcctggtgggtgttgtagtacaattgtttgtgacacaaaggcatatttgtgtttagcagtgtgactcagtgaagtgtgtgagttagttatgcctggcggtagtaggaaccctcttgttgttgggcgtgttataggggaagtaatagatccctttgaaatttctattcctttcagggtcacctatggtaatagagaagtgggcaatggttgtgagcttaaaccttcccaagttgccaaccaacccagagtgagtgttggtggagatgacctcaggaacttctacactatggtaattagttacatgagttagttatcatattatatttacatatatatagtgctttgctaaacaaaattctgtttaatttcgtttcttctatcaaaggtcctggtggatcctgatgctcctagcccaagtaaccctaatttcagggagtaccttcattggtgagtacataccttgcataccgttagatgaaccaaatttacatataagagagactttaatattacattataactaatacccttccctctatggattttctataggttggtgactgatattccagaaactacagggcctaatttcggtgtgtatatatatagttaattttaccattcatttaaaatattacaaataactcccttgaattataagttaattgtaaaaagaatattgagaattaggattatctttttattagtctaactcgtgtctatcaaaaaataaactgttagtataaatattattatgagtgtatatataataaaaatgtgatacattatactaacacttatatattgataatatatattaatttctatactaataaaattgtctattaatatgatttgtcatacttttaatacagacttccaatattaatactaaggatttatttgtttgttagtcaaagattatatatactaacatagattaatccaatgtcgtatcctataagaaaataacgtttctttttatagtaaattcaaacaagttctatatatttatttatctgctagatgtttaattagttttaaattacccaaaccgggacaaacattaaatagtataaaaatatttgctaaaaaataacttaatggataattattagtacgtctaatcatgctaaaagtcagcgtagctacgatatacaagcattgttaagccttttctttttgttaaaaattcccttgcacgttatacttttcttttgaggctttttcattgtgttaaagtccctttatatttttttcctaaataataactgaaactttcgtttagaagatagcggaaatattacaagaaatcatataaaacaaatggcaaaatacttaattttataaactatattacaaattaaagcgtgaaaatgtaaatgaactttataatattaaaaatatttgttttcttataccaaattagttacttttgtgatgtctttaaaaaaaagctacataactctactgctatatatcatgtacaaattagattaatattatagagattttatatttgtacaacattttttaacattaatactgattattattttttatttatttcactttttatattttgttcgcatatcacgtcacaagatcataaaaagtgacatgaatatatacaacacccaaattatatattcaatttgaatctgctattggtagtttgtcgacaagtttgcgttaccacaatccgattttggaacctatcacatcatgcgcgaaacactagtttcaagaaaatctcttgtcgtgcagggattggagtataaaagtattggaatcatttatgtggccaacgtttcttgatatatacttgaaatgcaaatagggtttatatgatgatacataacatctcatgcaggaaattaaaaatgattccacgaggcatcaaattctaaattacatgcgatgagacaaatgactacatgtcccaaaagatatataaatatctaattccaataataaaaaatatgtctaacaccaaaatatatgctaaattttgatacacgttagtagtatctcagtagtttataaatatatatatatatatatgctaattacgagtttgcatgatttgcacgtacgaaggtaacgaggttgtaagctatgaaagcccacgacccacgatggggattcatcggttggtgtttgtgttattccgtcaacagtttagacagagggtgtatgctcctggatggcgacaaaatttcaataccagagaatttgctgaactttacaaccttggattgccggttgctgctgtcttcttcaactgtcagagggaaagtggctctggtggtagaacattttgaaagctatctcttctgttaatgtaccaaaagtgcatatttagttaatgaatactactatatagcacccaaataagaaaggtaatctacatataataacactcatgggtcacatatgaatatgtaaccgaagcactcatgtgtaccgctttatgtttttatatatgtgtacttatatcaatataaatatagaatattaaacatttgactattagatcaattcccagatcctccaagtggagctttgagggtgagtttagttgtgttaggagagaaaatgaccgaatgagaaagaatacgtaagagaaaagaagagaaatagaataaaaataataaggatttgattgaaatagaagaaaataaaagaaaaatatttaaattaaagtgatttgattggcaaataaagaagagaaagaagataaattaatattaccgagcatgaggtccacaacttttttgaaaatttccccactaatctctcataccaaatcatcaagcttttggaattttctctctcttcccttctcctctcctttctctccttcatatcaaaccaatgctgagagtttgtcaagtgtcaccaaatgattggaagtatgacttgtcttttatttaaaaaacattgtgacacggatatatatatatatattcaaaaagttaaaaaggatctaattcatttaggcattacaccccttacttgatcgtgataattgaaaaagacattcatgattcagttatatttaaagataaattagtaacttcaagaactctaaatcatcaagtgaaccaaatcatctataattacatcccatatattttagattcctcttcatgatattgtggagtattgcttgaagaagtaaaaaattgctatgaacaaatactaaatcttccgctctatgtggtgtcatcttgataatttgaagataattgataaatgaataagtactctgattcctttcacaacatgaagatgaacaaatgttgtgttagtaatttaagg

SEQ ID NO: 286 - DNA, 8476 bp, Glycine max
aaataataaagtactaataaaatcaataatttgatatggtctagtgtatagcctactgctctacgcataataatgttataaaaaaataataaaatcaattaaataaaaccattcattctgtcgttaaccataagggtagcacaacgaacaggaataatgggcggaggtgcgcattaaacaaagcacaggtattagtcatgatgaaaaagggtttgttttggttttgtttttttttttttttacggaaggatttgtttgttttaaaattaagtaaaacaagtattttatgccgataaatatttttttttatataattaaaatttgtattaaattatttttaacatcatttatgttataattataatttataataaataaatatcgttgaatatatatatatatatatatatatatatatatatatattagatttataattaattaaaaatttaaaattttactataattaattttatttttaatcatttacagattatttaaaaaattaaaaagtttaatttagaaataaagataaatgaaagtaaattgaaagacataaacgagtaagaataacgtttggctaatcgtgaaatacacaacaaaaaaaggagatgaaatattgataatctgtaattgaaagaattatgagagttctcttgttgctttaaattatgtattctaattataatgaaagggtattaatttcaatacggatagtaatatttatgcctgcagcctggcctttcctttgtagtatctttgtgcgttgccttcaatgccttgtctattaatccttgtaaattattgtgagtaccattggtactcttaatagatcctttttaattggcctataaattaattcataaaatttatgttaaacaaatggcaattggaagtgtgtgtaattaatattaattaagtttaactaaatttacattgaaacatgcacatagtgtggataattatggactttccccagctaaatatataatatatacttatatgtttgggactcgggagtgaatgatcatgactactgcaattcactacttgagagtttgaaaatggtacttgtgctatggtcaagagggactaagaacatggacttcctaaccctcttcactcttctactcttgttattcattcatacagcactctcttctacccaatatcatgatgggaacatcttactcactcatcgtaagatcttccccaaacaggaagctatcacctcgtacgctgtcatctttgatgctggtagcactggtagccgtgtgcatgtcttccatttcgaccagaacttggatctccttcgtattggcaacgaactcgagttttatgataaggtcaaaactactaattcataagctacagttatatttaacgaatacttacaacactctttctactaaaattcattagaagtcgcaaattttagtagttttcctttttatttaacgagtttcaacttctgaattaaaaatgaaacctatcaaaatttataatttccgaccaattttaaaccaacaatagaaagtagtgtatgaaaagtgtcactaacattcctagttatatttacacattcatgtcaatctccattctcttcacttcttacagtcttcattaattattgtggtgtaggtaacacccggtttgagtgcatacgcagataatcctcaacaagctgcagaatctcttatcccacttttagaggaagctgaaagtgttgtccctgaggacctgtaccctactacacccgttaagcttggggttggtgtttcgggtctctatatttgtcactcactggtcacaattaatgggttacttttgaggatttgaacccaaggttttaatcatattactggtcacagttagaaattcttaaaagactttgaatccttatatttctttggtaacaaaacaactcttgtttttttttttttaaaaaaaaagaaagcaatcatcctattacataaaattgataattttttctataggcattatataaggagagaaaataagaatataaaatgaaataatttttttaataaattaaaattaatttatgtacaagttaatttatagatactttctcattcaacttctctaaaacacttatttaaatgtatgtaaaagttaattctagtttatgaaaaatatttaatttaattattttttctagcttaagtattcaattgataagtttatcgtaacatggcctaattaaataatctggtcgatgtagctgcaattactttcatgatatgatttaaaaaataggccacaaaatctttaatattgcagcagcaattgaagtttttaagtatattcatgacttgaccttgaagtttgggtagagactatatatatatatatatatatatatataaagtcatgaatataattaaaaataatgtacaactagttgtcactttaactctttaatagttcattatgtaaagggcctgagtgtactgagtgtacatgtattttcaattttttatgctaatgcaggcgactgcaggtttaaggcttttggaaggggatgcttctgaaaggatattgcaagcggtaactaggatcttcatttcttaattccttataagcatgctttcaatgtctaaagttttcattttcttatctttaggttagggatttgctcaagaacagaagtaccctgaacactcaaccagatgcagtagctattattgatggaacccaagaaggttcttatctatgggtatgaataaccaaactgattttaatttttatgtcatttatatgttcataactttattcatttgactgcacatctataatctggagaaattattaatctaagtatttttcttactctatatggaaatctcagcaattcattaatttgaagcacatctccaatacttcatttacaacacacgtatgaaacgaatagtgggcgatcctctaaggcgactaaagaatttgtttttgattaattttgtgctccaaccatgttttcttacacctcaattttcaaaccttcttttaattatccctgtctcttcatctttccattacaatatcatctattgcatctatttttctttttcctcattttctttatatctctttcttctctcaggtgtatatatttgaagggatgtcaaatgatcattattcatccaccaatgtctaaaattaatccagtgtttgaacccagttaattatactattcatttgattatttatttttttgaattatttattgcagagtcataatactctttatttaaaaaataatttgcaacactttcaagaatgaactcttacaaagttttaatttttcttatgggtgacgatttgggttgatgcactgatgactactgattatactgttatagttgttatatatttgttacttaatcaatatatatacagaatgtatatacacaacaaaagtaagcagatacagacacgggacaaagatacaacttgacatccaagcggatacgggaaaaaattaattataatataaatcatacaaatttgtaaattattagaaatggataaaaaaaatgttaaagtatatgttatggacgattctaaacataaataccaatataacaataacaattatttaaatgtgtatttcgtgagacaaggaagcctagaaatttggctttacatgaaagtttgaaattatttaattcttctcacctggtacacttctgtttagatcattaatttggtaagtcaaaagtaaatttttcgatacactaagtcaaaagtaaattggaaaacaagaaacaaataatagtgaaattaaaaatataaccattaaatgcccgttcaaatagattattagattctttcagtcttaaattgcaatccgtaatcactgctataatctcagtatatatcacgattttttaaggcttcaccattttaacatgactgcaataacgatccattgatttctcttaaacagttgcacacctgtagtgaggagagaaaaagatgagtcctacctgaaagtgtacctgttaaagagaatccaagttcgcaataacggatacatcaactccttgtagccttgtaattaattaggatattaaaatgcaatattagacaataggttatttttggtactgtgcccactgtccactatatatcgttatgtggattaggaacacatatagtagtagtgttttttgtctcttatcctacaacttttttttaggtgacaattaattatttattggggaagttgggaaaaaggttttcaaagacagtaggagtagttgatcttggaggtggatcagttcaaatggcatatgccatctcaaggaacacagcaaaaaatgctccaaaaccaccagatggagaggaaccttacataaagaagcttgtactcaagggaaaggaatatgacctctatgttcacaggttaatttccttcttattcttcgtatatatattttagtagctagtgccagtagatgttaaggtgtacaacttttgagagctaaagctcttggacaatgaagcacttttgacactgacaccaaatacaacacatacatgaacacttgaacacaattaatgtcgaccacaataaagaccctcgagatatttaatttatataattcacaattctaaaacaaagttattaagcttcacaatttccatataatactgaataatgaccctcgggtagaatataccaaaagagatcactcgaaaatacaatctttacaacagaaaaaattctaacataagatgaataatatttcttaaaagctaaaacaactagttaattttttttttataaaattttctaagtgttttgttgaaaataatccaagtttcacgtaaactaacaatacaatacaaccatagaagactttgtcaataagaggcaaccctcaccctttaagttagtttttgggattgagttaagtctaaactcacatcaagtctaagaagtatttgacacgagggacaattcttatccctttaactagtttttgggattgaattaatatttctttgatatgatacgagtcacatcacagaggtgtttgagaaaaaaaaaattaattacaacacgagtgagaggtgtttaacatgtgtcatacacgtgtcccacaagtgttggtacttcttagctcatggatcagactttctaaggctatattcggataaatgttgaatttccaaatttcaatatacatttacgaattttattgtaaaaaaatgaaaaggaattgtttttctttaaaaataaaagtatttttaagttctccttattgaaatctaaacatggaccgagttgtatcaattagaagtctagatagaggtagaaaataatattattctttgatacatggcccatgcaacggctaatatatatatagttttaacatccttctttcagttatttgcattacggtagagaagcatctcgtgccgagattttgaaggtcactgatggctccgctaacccttgtattttagctggcttcgatggtaaacacggattcttcatttcttcaaatgccctgatgcttcttcgatgctaaattcccccatcttaattgtttgggattctgcacttaacagtataattaagggagaaagaacttccgaatttaaataactttttatattcgtttctgtttcttcttttcaagttttttatttttagcatgccaataacacaattgtggacgtttttattccttaaagggacctacacatattcaggagcagactataaggccttcgctcccatttctggctccagctacgatgaatgtagagaggttgttcttcaagctctcaaattgaatgagtcatgcccccatcaaaattgcacatttggtggtatatgggatggtggaaggggaagtggacagaaaattcttttcggcacttcatctttctattatctgcctacagaggtatatatatctaatatttattggataaaatttgttttagatcccataattttaatttaaaatagttttggttattatctttaaaatttgtttttggctttcggccgaaaaatacctggattcacctaaaccaaaataatgatttgaatccttgtatattttataattgtgaatttcgtctctcattctagtattctaaattttttatagagagacaaaatttgtcattattaaaaatatggaaactaaaatcatggagactgaaaattagacacatgtgaaatagggaattgctacggatagtttgagtgatttgcgaggaaatgatgagttactatataagtattaatagcgagagacttgcgaaggaatagctagggaatatgtccaattaatagcgacgaagtaacgagaaacttgcatggaactgttcacgaaggaatgattatagaattgccagggataaacagcgagacattagagaaagatttgccgggaaagagtaagagaatgttactgagggattagcgcgggaaaaacaagaagctatagtcgcaaatttgcgagggatatggctagtttctttcatgcaattagcggaggatttgatatggaaatggcgacacactagcaagggaacattctcacactaatttgctacttggatttagcaaaaggagagtttttctaactaatccttcattaattgttgagaatagtctcacattaaatgtttaacaaacttgataaatgcttatatacttgggtaggtcacctccttatgaaccaatttttaagagaacctttaggatgtttactgcattataaatttaatatggtatcaactgccagccctcgattttgtgatagattagcgaggaactagctagggaatgttctgtccctaacatgcatttttcttaaaccaatttgtcctattttatttaatcatggacaactttcatattttgaatcttcctcgtggaaattctaactacgtcgtatttgatctattagattggtatcattgatctaaataaacccaactccaaaattcatcctgttgatcttgagattgaagctaaacgagcttgtgaaacaaaattggaggatgccaagtccacctatccaaaccttgctgaggatagacttccatatgtatgcttggatattgcataccagtatgcattgtacaccgatggatttggtaagttgcattgtgaagttgatatgtgttgttccaaaatatgttggcaccttcatttaatttgttggccttttatactgacttttatcatattttggcaggccttgatccatggcaagagattacagtggcaaatgaaatagaatatcaggatgctcttgtggaagctgcatggcctttaggcactgccatagaagccatatcgtcattgcctaaatttgatcgattaatgtattttatttaaagcttatgctgggatatttcagtgttaaaggccactttacaaaaaaagaaaataaataaaataaaacttatccgtcttaattcatcccttcattaattcctgcaagtggaatcttagttttgttatatgggtgggttaatttatttttaaaaaccaaaaagcaagccgtttgaaaaaaatcagtgaagtaaagtggttaggtgttagactccacttgagtctctcataaggtaatttttttcccttcttactatgcaattaacatgcaattactccaatttagttcatccccaatatcttgagtaataaactctttttttctaattatgacaaataaagtaactttctaataactcatgcagcgtgttgaatcaactaagtcgaattcatcaatttgaaataaaaagagtaattagccaactttattggcaacaaattgcgtgaacaagaaaaggggctcaagtatatgatacaaattggaagaaattgatttgcccaaagaaacaaccagattgtagtcctaagacttaatttagcaaaataaagaagtaaaaagaatcaaaggtaagataaaaacaaaaaagagaaaagcatggggaaacttttattaaggaggtaaactatagtggatttcaagggggaaattaagtggctcaataataaccaggttaaaaaaaatagcaaagggaagatgctatctttgattaagagactttgagaagcttaaatttgaccaatgttaaaaggataaaacttaaatttgacctatttatccattttagacttttttctaaaggccaaacttgacctgcataaaactttgcatggtctacaaatttgttcaaaagcctattttgtgataaatcttataaaagatgacactttctatttacactgccatgtttgctaagtacaccccatttattctctttatattttttattgccaattgtactctttttatttgttaaaacataattttggaaataactttccataaaaacatgtcaattccaaaaaaatattttatggaactatgttttaacaaaatacacatagtttcgaaaactactttccata

SEQ ID NO: 287 - DNA, 3255 bp, Glycine max
acttccattcatttaatttttcacttctctattttcatttctttttattaatcacttatatttaaaagaaaatgtaataaagaaaaaagacaaataataaaaaaaatatgacttaaattttttaaaatatttaataaatgattgaattttattctgaatctctaataaaatttttattattttaagtcttcgatatgttgaaatttttattttaaatttacatcattaattaaataataagtattatcttataaattaaaatttttaaaattattaatgattataatggtatcatattataatgtcatcatttaatttgatcataaagacttaaaacaaaaattttaatatgccagaaatattaaaaaactaaaaaaatattaaaatagaaaaaaaaatatagtctcacaacaaacaaatacagtaattaagtaggactaatcagttcttaaactgtattaataaagcagagtgatatatagtgaaacgagctcacctttttttataagcacgtgtcacttaataacacgatcttttaactgaaattaaacaactaactaaatcacatcacataagattacagttgcagaaaaatgaaattactgtccgttaatccttgcatcgtgcttgtttgtatactttgtaccagagttaatatatatatatatatatatatatatatatatatatttaaaaaaaaaaaggagacagagaaacagaataattaaaggcaacaggaaaaaacaaaaaggtttagttgtcatggcaacagaaatagaaatatccatccacacgtggatctcagtgccgcgcctcagcgcgtgttcattggtatttgaaagcagaaaaagcaaagaagataccataaagagacaattatattggcacctccttccaatttccattatcatttccttcccaaacccaaaacttactcaccatatattcttcattcttctacttccattaattcccctaaattcagaagaagaagaagaaaatgagaaacccatcactaccaacattagcaacaaccaagaccaaggtgaagaacaatagtaacaaaagtaccaacaacaacaacaacattggtaccaactactctccatgctgcaacaatgttgggttgaagcgagggccatggacgccagaggaggacgaggtgttagcgaattacatcaataaagaaggagaaggacggtggagaacgctcccgaagcgcgccggccttctccgctgcggcaagagctgccgcctccgctggatgaactacctccgcccctccgtcaagcgcggccacatcgcccccgacgaggaagatctcatcctccgcctacaccgcctcctgggcaatcggtacacataccatcttccgtttaagggtttaggtttaactgatcaattattcccacaaaaattagggttcttacacttttttttctaactagggtttattaatttgttgtctccacattggatgtggcaggtggtctttgatagctgggaggattcctggaagaacagacaatgaaataaagaactattggaatacccatctaagtaagaagcttattaaccaagggattgatccaagaacccacaagcctcttaacccaccatctattgccgttccttcttcttcaacaacttctactattccaccttctaaacctcctccagtgatcatcaccaacaacaacattaacccttttcatcacgatctcaccaacatgtttaaccaaggagttcatcttaatcatctaggtcaacatcaccaacctcctccactttctaatccctgtgataaccataacccagtaccagctgctgccaccgatgatgtttctgcaatgggtttcatggacaacaacaacgaggattgcaacaacgatggtatcaacatcaattattactccgacgatgtcttttcttccttcctcaactctttgatcaacgatgatgcttttgaggcgcagcagcagcagcaccacgtgcaaacagagatccccacacccagtgagcgtagcattaatccactgccatgtgatgatcgtgtcgatgatcatcatctgggttcaatcaccactgcttctgcatcgcaaggttatgacgatgagcttggggttctgtgggaatcgccactcgtgagtgctactttcagccaacacgttaacgatcacatcacaaagagggttcatgatcaccacaatcaatagtgtctagtactgttgttattattggttaccagcttcatcaaataccaagggttcaaagaataattgtgttgttgtccatcctgtgaaaagatggagagaaaaagtaagaaggacattaaagaaagaattcacgttaaataatattcttgaagctagctctggtctttaaccaagatgaataacgtctaatgattcatatagccgaacttacttagtcggataagttttcattgttgtaattgtgttgtcggtgtttccatatataagttgttgttgcttttgttgtattgaaattttagtgatgtaatttcatgtcatgcacatttaatttgcctatagctttctgcctttgctctctatgcaaaacaacacattttattaatgtactacgatttgtgttttaaattatagtactgttttacatcaatgaattcatgtatgcagagtggaatctagattattttatactatgtgtgtgtctttttcactttaaataaacttcactcttccatcatttaaaagataattttgttcatgttcaatattgatattcttagtgtgaatgaaagaagttttgctttcttataacaatcaaagagtttgcaaaagatattaagaaatatatcaaactctatgaataatgtaatgatatatacattatgaaattatccgttgtgtaagatatactattttattgaagacagaatctaaatggtggagaataaatcaatatctaatggacaaatgaaagcatggaaatgtaaagttctacaatattaattcaaagttataaaatggactaaattaataatcatatgtataactcttcatacaagtgcatacatacatgcatatgacttaccttcaagagcaaggttgatggcataaacatatgcattagtactctttctgcatgtatatatggaaacataagcacactaggatgcggaagttgatatctctgtgtagtttcttgaagtttgcatgactttatattgccatcatgaagaggtcaggtcagcgggtacagctgcacaaa

SEQ ID NO: 288 - DNA, 4327 bp, Glycine max
ctatcttctcgagagaacattttctctcttcaccacctccagaagcttccccctctgctcctatatatcttcttcctcttcgccatggcccattcgtctcgtgtgacctttgtcggcatcaacacctccggccaccaccgcaacaccttcgtgtcaccacacctttgtctggccttaccttcacttcgcgtcaccacctctggccatggtagtgtctcgcatcacctttgctggggtcaacaatgaaggacatggtcgcgtctccggtcatggtttcatcttcggcatggtgcgtttgtcgtcacaattgttgcgtttgattttttcctttttctcctttactgttttgcttgaatctagatttaaatcactttttttttttaaatttgatgatttttgggatttattgtggttgttcaacgagtctatacgtttcgtgttctttccttggatagttatttttcctcgtattgaacctctgttttgtgtgagaaaatcaattttttaatgattagatatttgttatgtatgtgaaaatcatttttaaaataggttctctttccgtaagaacatcaaagtttatgattatgttttccctttaatttttgtggccgttatggttttaactttaatgtagcttcaattatattcccaaatgggttttaacttattaaaatagatacatgattactacaccagagacacacacattacactactgaaatgttaaaatattattaaaaatgggatcatatatatatatatatatatatattataattgtttcgaattaatatgaaattcttatcctgcgctcatattatattttgctcctgcgatacgttgttaacttttattcgtaaaatttaaaaatatggttacgtgtcacctaaaaattaggtgggactacatgaaataatttctcctacagaaagtaataaattatataactttatttattgtgatgatcgacgtgtttataatttttgtatgagaatcacgagatcacgatgtgcacactcctatgtttacgctccacaattctacaccacgtagccctcatcaaatcgttttccaccacaagaaccaaaggatctccgttactctcgtttcttctccaacaactgaaagcaaaaaccttactcttctcacttatctccttggcaaaaacaattttggttcagttaattagtttctctctttgcactttctcttgtttccacaaagccatgaaatcacgtcctttgcacatagcaatgtatccatggctggccatgggtcaccaaaccgcattcctccacctatgcaacaagttagccattaggggccacaaaatctccttcatcaccccaccaaaagcacaagccaagttagaaccattcaacttgcacccaaattcaatcacctttgtcaccatcaatgttccacacgttgaaggccttcctccagatgcacaaacaacagcagatgtcacttaccctttgcagccacagatcatgacagccatggatctcaccaaagatgacatagaaacccttctcactggcctcaaacctgacctcgtcttctatgacttcacacattggatgccagccttagcaaagcgtttaggcatcaaggctgtgcactattgtactgctagctctgtcatggttggttacactctcacaccgtctagatttcaccaaggaacagacctaatggaaagtgatctcatggaacccccagaagggtatcttaccaaataccgatactttaatttactttgcgtatccatatatccatatccgatatgtatgtgataccaatactcttgaatatttcacagatatgtgaagtatctggcctttaaatatatatatatatttttttatgaaaattcaatgtagctacatgaaacatagcaacattatcctttgatgaaccaaaaatgaaaattttcgtctttatatatgaatgatttcaagaaagaagtgagatccttgtaagtaataggaaataatttatgatgatagtaatttagtattgcaagaagtatgattttaatttagatttgtagaattgtaatcgtatatttattatgttggataaaatatgtcaacagtctttacacttcagtgaaacttgatgattcaaactttaatttttgatcaatttgattgaagttaaattacgaagactagtaccaaattttatcgcatcctatatatacttttagactgatcatatatatcgtgtctatgcatctcataggtaccctgactcatcaatcaagctccaaactcacgaggctcgtacctttgctgcaaaaagaaaggatacatttgggagcaatgttctcttctacgatcgccaattcattgcattgaatgaagccgatttgttggcatacagaacatgcagagaaatagaagggccatatatggattacattggaaagcagttcaacaagccagtggtagcaaccgggccagttattctagacccaccaactttagatttggaggagaaattttcaacatggcttggagggtttgagcctggctctgtagtttattgttgctttggaagtgagtgcactttgaggccaaaccagttcctagagcttgtgcttggtcttgaactcacaggcatgccattcttggcagcagtgaaggccccattagggtttgagacagtggaatcagcaatgcctgaagggtttcaagagagggtcaaagggagaggatttgtgtatggtggatgggttcagcagcagttgattcttgcacacccttctgtagggtgtttcatcacacattgtggatcagggtccttgtctgaggcactggtgaacaagtgtcagttggtgctgttgcctaatgttggtgaccagatcctcaatgcaaggatgatggggaccaacttggaggttggtgtggaagtggagaagggtgatgaggatggaatgtacaccaaggagagtgtgtgtaaagctgtgagcattgtgatggattgtgagaatgaaaccagcaaaagggttagggctaatcatgctaggatcagagagttgctgcttaacaaagatttggagtcatcttatgttgacagtttctgcatgaggcttcaagagattgtagagggaatttgacttgtggcaattaatatttgatagatgatgatagttttacatgaatggcaatggttttgaggtgatgattgatttgttcaaggctggagtggagcctagtaggtcaattcaactagttcttatgtgtgaaaatttcctttaattttttcttttatttttttataagctaaaaagtttcaatggctagagatttcttatattataagggaaatgttaattaatgtctttagacattaattaaagaattaaaaaaatatttcttttgagatgcatgttatgtatgttttatttttatgttcttatataatatctacaataaatatatattttttattttttaatcaatatttaaaaatactggttcgcaaaattctattaaaaagttgtctatatcgataatacatattttagtctaggaacatccgatgtcaaagtcattgaattggtaagtcgcttcaattttgaagtagataagttgtgctagtttttacacctaatagcattaacaatgtgaactttgatcttttgtgttattaatcattctgttaattactttcaaattccaagctaacatgaattggaattgacaagtccaaacaaaaatagaaacaaaaaggaatgtggtatgatgcaacaataattcatataatattttttttatctctctccactcaattatttattacatgttaatatttttttattttcttttctctttctttgtagtgcaatttgttttataagtatatttctcaaaagaaataaatactccaaagggcaaaaatatgaaaatattaatggacatctattgctctcttctccaatagagagccatatatataattaatcaattattaatgtaatgtcaagagagataaaaaagaaataaagaatatcaatcatgtatttgaactgtttaagtatcataaattaactctctaaaaagagtgttgatatttgagcacctataaattacaaatatttcatggacagatcaatctctttttctttcctcacgtttttcttatcacattataccaaatgtatcaatcacttatctttttctttttctatctttctcaagtatagacacccaaaaaaacatttttccttaaaaaagtgagttggtaaataaaatgtctaaatcgacaagtagatttccatcaatttattattttaatagacagaggagcattt

SEQ ID NO: 289 - DNA, 7685 bp, Glycine max
tgaaatccgaaatggaagtgaaagaagggggcaataagcctagtaaaacctcccatccatgatcgacaactgtctttattgtctgttttaggaaccaacaacgccaaacccacttgctcaatttagttttcttttcaatataataaatgcacaaattgctgccagaatcggagtgaatctaatgtcgtatcgcgtgtaaaatccaataaaatactccactataataatattttattattaaaatatactagtagtattgatttttttttgttttattataagaatttaatttaaatatatgaagaatataatttttttatgtttttaatttttatgtattatgagtattattgttgactattaatcaaaattcagtgtgcatatttaattatttaaaaatcaataaatttattatatattataattatgattattatataatttatttacttttttatattatttaatcacaaattattatactgtctatatgataaatcttttaattttaataagaactattaagtataaaataattaaaaaaagaactattttaaatttttataacaagacaggtcgatacaaattaataaaaatctaaaaatgactcttatcttttttgtggatataaatttgattctcttttgatgttactaaaattttatttgatgtggatgatctttttcacgtagattctcctaacacttaaaaactagttgaataattgtaaacttatgattgcttataatttagacttgaacaacaagatgaaattttgctactaatagtccttacatgtacttaacatcctatccaaaccaattacagaggagtgtcaactagttttacacatttttacattaaaaagaaaataaaacaaaaactttagttaaaaaaatgttgattttggtatattggccactcataaaagcttgaactgtagaacgaataatgatgaattgtttaatattttttttttattttaataatcagagttcattccccattaactcccacattcacattcacatggtgctcgaagtgggtactataaaaatgatatctttatggcatggcggtccctggtcacactcacagttgtggtgagtttgaagaagagggggttgggttccttggagagacatgggtgttgttgttgctcacacctcttttctttattttaacccttagcttcattgcttccttccttttgttgccactctttccctttcaaggttcgttgctaccatactcaccttttttccttttttctcttccctcctctgctgtctgtgatgttatcttatcctattcactttcctgcttttaatgtttgtgattcgtgtctgtttgttcctggcaaactatgttcttgtttcactggaaattgttttgtcggctcgtagttgttcagtgtgttaacgtacagtatgatcaattttcttcaaaattgagaataataacgttcaattttattccatcattgagcatgtacagttgtgtgattgggtcgttgttcacaatctacatgatgtgtatttattcacctgagctgtggagattgtttgtatttcatgattgggtcataaaataaattgttagtagttactcaagtcttttgtaattttgtcatcttgagaaggtgttggaagtttgttattatcttctcgaattgttacatgagcaggagggaattgattggcattggagtaaattgattaatagattttaacttgttctcagatgttcttatatgattcagattaacttttactcgttatttttttacatttcaagtgcagtttggggcgaaaatgtctacctcaaggcctagccaatcatccagcaattcggggagatcaagacgtagtgctagggctatggctctggcaactgtagatgcaaaactccatgcaacttttgaggagtctggtagttcctttgactactccagttcggtgcgcatctctggtacagctgatggagtcaatcaaccaaggcatgacaaagttacaacagcttacctccaccacatgcagaaaggcaagatgattcagccttttgggtgcttgttggccttagatgagaaaacatgcaaggtcattgcatacagtgagaacgcacccgaaatgctgaccatggtgagccatgctgtccccagtgttggtgaccaccctgcccttggtattggcactgacataaaaactctattcactgcaccaagtgcttctgcattgcagaaggctctaggatttgcagaggttttgcttcttaaccctgtccttatccattgcaagacctctgggaagcccttttatgcgattatccatcgtgtcactggtagtatgatcattgactttgagccagtcaagccgtatgaagttcccatgactgcagcaggtgccttgcaatcttacaagcttgctgccaaagcaattacccgattgcaatcgttgcctagtgggagcatggaaagactatgtgatactatggttcaagaagtttttgaactcacaggttatgatagggtgatggcttataaatttcacgaggatgatcatggagaggtgattgctgagataacaaagccaggtcttgagccatatctgggtttgcactatccagccaccgatattccccaggcttcacgctttttatttatgaagaacaaggttcgtatgatagttgattgtcatgcaaaacacgtgagggttcttcaagatgaaaaactcccatttgatttgactttgtgtggttccaccttaagagctcctcatagctgccacgcacagtacatggcgaacatggattcaattgcttccctggttatggcagttgtagtcaatgacaatgaagaagatggggacactgatgctattcagccacaaaagaggaagagactttggggattggtagtttgccataacactactcccaggtttgttccctttcctctaaggtatgcttgtgagtttctggctcaagtatttgccatccatgttaacaaagaaatagagttggaatatcagattattgagaagaatatcctgcgcacccagacactcttgtgtgatctggtgatgcgagatgcacccctgggaattgtgtcagagagccccaatataatggatcttgtgaaatgtgatggagctgccctcatatataagaacaaggtatggagattaggagtaacaccaagtgaatcccagataagagagatagctttttggttgtctgagtaccatatggattccacaggcttcagtacagatagcttgtctgatgcagggttcccatcggctctttctctgggtgatgttgtttgtggaatggcagcagttagagtaactgcaaaagacgtagtattttggtttcggtcacacactgctgcagaaatccgatggggtggtgcaaagcatgaagctggagaaaaagatgatggtaggaggatgcatccaagatcatcattcaaggttttccttgatgttgtgaaggcaaggagcttaccatggaaggaatatgaaatagatgctatgcattccttgcagttaatactgagaaatgcattcaaagataccgagagtatggatttaaacacaaaagcaattaatacaagactaagcgatttgaagattgaggggatgcaggaactggaagcagtgacaagtgagattgttaggttgattgaaacagcaacagtgcctattttggcagttgatgttgatgggctggtcaatgggtggaacataaaaattgctgagttgacaggtcttccagttggtgaagctatgggaaagcatttactcacacttgttgaggattcttcaactgatagagtcaagaagatgcttaacttagcactgctaggtatgtcttttttttccctctctctgtcttatccttctatactcttttcttctctttgtttttcaagccttatcattcataagcaaaagcttaaaaaatgagttagtatgtgcctttgtctatttagctgtgagcaactgagcatattatgttccctaaagccacacatgaactttgcattgatgaagaattctgagaagaaaagtatgtcttattgacagtttcattcaattttgtgcccttacaataacttgggaaggaatggaacaccctaggagttgtgttgttatttttattttgggggcttggtggaaggaattgatgcaatttatctgacacaatgagcttgtattcttctaacctgctttccatattttttatttgttgttttgttctgttaactaggtgaagaagagaagaatgtccaatttgagatcaaaacacatgggtctaagatggattctggtcctattagtttagtagtaaatgcttgcgcaagcagggatcttcgagataatgttgttggggtttgttttgtggcccatgatataactgctcagaagaatgtcatggacaaatttacgcgtattgaaggtgattacaaggcaattgtacagaaccgcaatccattaatccctcctatatttggcacagatgaatttggctggtgttgtgagtggaatccagctatgacgaagttaactggatggaagcgagaggaggtgatggataaaatgcttttgggagagctttttggcacccatatggctgcttgtcgcctaaagaatcaagaagcttttgttaatttgggtgttgtacttaataaagccatgactggtttggaaacagagaaggttccttttggtttctttgctcggaatggcaagtatgtggaatgcctgctttctgtgagtaagaaattggacgtagagggcctagttactggggtcttctgcttcttacagctagctagcccagagctccaacaagcattacatattcagcgcctatccgagcaaactgccttgaagagattaaatgcattaagttacatgaaaaggcaaatcaggaatcctttgtgtggaattatattttcccggaaaatgttggagggtactgccttgggaacagagcagaaacaacttctacgcactagtgctcagtgccagcagcagcttagtaaaattcttgatgactcagatcttgatagtatcatagatgggtatgatatctctgaatttgttctttttccccttatttacattcatgtggtgtgaagcatttatcagttgaaacctcattgaaactcaagactagaaagttaacctcattcatgcaactaaactccaaaaacattgactagtataacacaactgatattttgtgtttgttgttatcatgttctgtcgttctcaaggttcttgttatgtagttttgtcatgttttgaacttttgttagagtgtagggtacccatataaaatgttcaattattagcatctttgaaagaaggcatccaataggtatgtttatttttcattcacactgtgctttcaaaatcactctgtagtgctagattaatttgtttgtatgaaattatgaatacacaaacatgaccaaaaatacaaagtttcctcatttatttgtcttggcatcttccataacaattatgtaatctttttttgttttcctgtgtgttcaacagttacttggatcttgaaatggctgagttcactctgcatgaagttctggttacctcacttagtcaggtcatgacaaaaagtaatggaaagagtatccgaatagtcaatgatgttgcagagcagattgtgatggaaactttatatggtgatagtcttaggcttcagcaggtattggctgactttttacttatttccatcaatttcactccaaatggaggtcaggttgttgtagcaggcactctaaccaaagaacagttaggcaaatccgtccatctcgttaagttagagctcaggtaactcttccatgcccgaattcaaaattcatttatttaatttaagttagagctcaggctattagtattcccactttatatgtgatttaaatgccaggaggaaacaatgtgtgacatgaattgatgcatgatcaacacattgctcgcttgtgctatgcaaagaaacttgcattgtttatgcagtcttgctaaccagtgtccttcctaaggacaccgataagggtcgacattaacattttcctttgtttttaaccaaaacataaagaaggaacttgcactataaccttgatttacatctaaataagtgtttattttttgtatttatgtagcataacacatggtgggagtggggtaccagaagcattactgaaccagatgtttggaaacaacgggctagaatccgaggagggtattagcctactgatcagcagaaagctgctgaagctgatgaatggagatgttcgctatctaagggaagcaggcaaatcagcttttatcctctctgctgaacttgcagcagcccataatttgaaaggttaaaagttttggaaaaaagaataaaagatgatgcaaccagcaaaacacaatctgttttgtacatcataaagagaacggagctagaaattaattgcatccaatgtaactctaatttgttcccacgtttcttattaactgcttcttgtaacgtacgttgtagatatgtattaatcttcttcccattccgtggcctgttctttctagagtttttccttatttacttattcctccatcaaacagcaatgatgaatcatttgttgcgaaatgaaacgtagaaattagaaaccgctgattctgtctctcgcttcttatttccacgtgttagccttggttttctacctaacttttatgattcaaattcgatcaatgaccaagcgaaatcttacacttttctcattcttcatatgtaatgtctgtcgtaattaagatttttacaatataacaaaatttagaaaaatactaaatattacaaacttgcaaatgaataaaataaaacttactcgaaattgcgttagtagtgtaaaatagctgttagtcgttaagtattaaagaaaaatatgttaatactggtttgagtaagctcatttcacacggcaaagtaatctcagatgatgataaaaaatatatatattggatttaaacggaatatgtttggcacagaggattagagttggacttcaagggtcagtaaccgcccacaaccgaaagaggaaaatacttgatatttttcattgtcttgccttattacataagtcttatatttacagcaaaattacaaataacagaatttggaattttgcataacatgataataactaatggtggaaatggattcggcaattggaattggcaggcaagcaggggacaaggttgccaagtcagcatcaaggccgttagaggtagtccttgaggtactcaagtttagtggcccataatacctcttagcaagcttcgaataagtacctgaaatggtggactgtcggtgggaccgtaatttcaccatgacctaatctccttccttaaaatttacgtccctgcgtttcttgtctaccatttgtttcatcaggacttgtgacttcaaaagcttctttcatatcacagcaaagacctcctccttgtttttcagaaaatcatcaactgcttcaagattggaggtttcggtaatgttttgtgggatagtaaagggtttcttgccgaaggtcaactcgtatggcgagattcctgaacctaaatgtatcgaggtattataagaccattccacccagttcaagaattttcccgaggacg

SEQ ID NO: 290 - DNA, 3306 bp, Glycine max
ggagttcctttaattatgccctcttcatcaggaatcttccaacaaaattaaaagaaagactatggctaagggaaaatggagaatcacgcacgcacaaacagaaatttgcatagtgtgtgcaaacaattaaggaaggttctctacgcaaggcatacaacagaaatttctgcacgtccatggtactagtagtatactaaagagaatgctaaaatgtgggtgttcaagaaacgaagcatttcctagaatttttgccttttatgcttttagtttaataataaaacggcagaagcttgacaacttgcaaaggggagggaggacccacacacacaggattacacatgatgctttttttgacctgatcgagctgatgggagagaaaaaactgggaaattttatatttttaaatattttttacaaattttttcagaactaggatgggatagaaataaataaaaaaagtacacaataagagttgctaatagaataaaaaaaattctttattggatgagaaatatccatgcatccggtgtacagccaatcaattaagaaccgattccaagggccccattctgtgtttatgaccagcggagagagaaagagagtggaaaagtggaaaggataactcgtcacatatcatgactaatgtgatttcagcacaaacatcccagacccaaaggcaattgttgagatgagccgaattaagagacaatatattagtagtagtgggaggacctgcacggatgcacttgatttatttctagccttttttcattttttgtttttcctatagaacttgtattttctctagctaaatctaaattatgtattgcaacatattttaaaggaggggcaaaacacactcgatctaccttcaaagaaacttttaagacattataaatatggagcccacactcccttcttcctcagtaagatcatcaacttgtattcctcacttccttagctcctcctcttccttgttcctcctcttacaatggcaaaaatgcctttagagcctctaatagtggggagagtcataggagaagttcttgattctttcaccacaagcacaaaaatgactgtgagttacaacaagaagcaagtttacaatggccatgagctcttcccttccactgtcaacaccaagcccaaggttgagattgagggtggtgatatgaggtccttctttacactggtatatatatttcttttatctcttctcttcttattccttttcttctttaaagaacaagatttttttggggaaaaaaaaagagaaaaaacttaagctgttgccagtgtgtttctttgttattttctgtaatcatggtcacacggtatgtctcttttattggagttttctttacaaatactgaatcattaagcaaatgtccccctttttcggtgcagatcatgactgaccctgatgttcctggccctagtgacccttatctgagagagcacttgcactggtacttaatataaaaattaactaacttaagtagtcatttattacataaataacacaccacacccaccccacatatattgttataccggtttctcttaataacttaacctctttaaaagttatgtactggttatccatctgatattcacgttagatgtctgtgtattttattatcaagtttgaagttttgcaagatatatgcattcctttcatcacatcaaactatggacagccaggaaggtaataacaaatacttacatcacatgaagaaggtacacacatgcctttgtattctgcaaaagtagcttgttccaccataatcccatccaccctaaaatcaaaacaatctaaaagggtgaataaatctcgaagtctcaaacaaacattacagaactacatataaggcaaacaaccagtaaccattcattcattcataggtatctaacagtcaataattttgttgcaaacattctttttgctgcaggatagtgacagatattccaggcacaacagatgccacatttggtaggttcatatgaaaaatgtgtatatatgggaacttactttgatgatcatgagagagatcactgacaaaaaatgatattcctaataatatgtagggaaagagttggtgagctatgaggtcccaaagcctaatattggaatccataggtttgtgtttgtcctgttcaagcaaaagcgtagacagtgtgttactccacccacttcaagggaccacttcaacacacgcaaattcgcagcagagaacgaccttggcctccctgtggctgctgtctacttcaatgcacagagggaaacggctgcaagaagacgctagctatagctaagtagctgctggttttgccactgcaacaaccaaagtagtattgtattgaataaagcgataaaaaggtacaagtacaaggagtttcagtagtggaagttgatcttcacatgtggcttcaaataacttgcagaaagaaggaagataatcattttctagtttgactagtgtgtatgctatgttttactttccatcagatgttgtgtacgttctgtagtataagtgtactacgtgtattattattacctcgtgggtactactatgaggtgatcttatatatatatatataaagaaataagaggtttggtaggccatgtcgtttcttttcctttaatagtttagggtttggcttcgtttcttctttccttgcggtttcgatcactcagtaccttctctctattggtttttttcgatctcttcacaactaaattacgtttttgacagaaaaaatggtattattaattaattactatatgagactttatgatcagtgacttgtacacactttcgatcttgtcatgttgattatttttcctcaagatgcgaaacatttcactttcagtaatacgaggcttgctcgtctatataatatttatgacatctgctttttgctaacttgatggattgacccttcaggaaacagtgatttctacaccaaatttccagcatatattcacactgctaaaataacatgtgattagtgtgtatggaaactgttaatatgcactcctttaaatgcaggtgtaatcgttccaatgccctaaacatagaagctatgaaataaaatggcgttatgttgaaatcaacacatttccagacacaagcacatttgacaatgggtttatctccgtttagtataataaaaataaaaataagaaaatgataagggtgttggttaagaaataaagagtagacatttttttaggattttactaatcaattcacttaaaaaaatataataaaataattttgttcattgatataaaaaaaaact

SEQ ID NO: 291 - DNA, 3750 bp, Glycine max
  modified_base (3359)..(3458): a, c, t, g, unknown or other
tatacatgagtgggcatattacaaatattcattttcaggaaagttccacctcttccactttacataatttaagttcattagtttcagattcaatatcaattccatgtgtatggggccacattttgaaggatattaatgtagataccacgaaatagaacttacataaggatttaaaaaagggttacttaaggatagagaggagaataagattctatgaaatggagatttgtagttcacataaactaggaagacaaggtattctaaagaaagaaagagacgtgcaaaagttcataaattctaatttaaattctgtcttttcttccgaatatggacacagattatctctttccggagttagctagcatttaaagggaatattttgctgtgatttggttttaattgttttcttataggaaaaagaatacggtatttgtaacgagttttgaaaatgaagttaaaaaagattttgaaaatgaatcaaattttcaacctgagaatttttaaggggaaaaggtcgtaaaatgatcagagaattagtactagcaccattttgtaaatgcacttgcaaccacagagaattagtaggttaacaaaatctctctaaaatgtttttttattagtctattttattaattaaaacttttaaaataatcaatgaaattgattaattaaatagagagtgtggtccatattaatgcataattaacgataaatttcaactaataataaaaatatgtttatatatatatatatatatatatatatatatatatatatatatatatatatatatatatatatatattatagtatattaaagttttattactcaatgcattgagtttactatttatcggagaaaagaaaacatttcatcgtacaacaaaaagaatcgaccgatcgaggacaactgatcacgaaaaacaaatgaagaatctattgatgggacagaagcaaaattaaagcagatgctaaggtggaaaaatatatatatagggatcatatgcgatgtatagtatacataattgtagaaccccaaacacaaacatcatagtatatagtatctatctaaagtaaataatcatggcacgggagaaccctcttgttattggtggtgtgattggggatgttctcaacccttttacaagctccgtttctttgactgtttcaatcaataatagggcgattagcaatggcttggaactcaggccctctcaagttgttaatcgccctagggttactgttggtggtgaagacctaaggaccttctacactctggtaagtaattaagtagtatatatagtggaaattaatcaattgctagctagcgagtacaaattagtcttaataaataagttattaacagctagtatgcatgctatatatataaaaatttatggttgaatctcaggttatggtggatgcagatgcacctagccctagcaaccctgtcttgagggaataccttcactggtgaatgagttatctttgcttctgtagtctcccaattgcttctgtttttaatttctattaacaaggaataccttcactgatattgattttttttaaaaggcaaatgaattattattaattaagaagaaaacaggatcaaggtcacaaggagtgtgccacgaaccatgcatcaatattacaaatcatcggggtcaagaaattaaaacatatagctttccataaaagcaggatacaccccgtaaccaagcttatattgattataatttgtatccaaaatttatatagcagtagagcctaaatatgctcaaattttataattttttcgtgaacttgtttattgacatatattatattcgtttgttatcaatctttctctctttaacaatgacaggatggtgacagatattccagctaccacaaatgcaagctttggtaagtacaaatattctaagtgttgtgtatatgcttaagtagccgtgggataaaaataacatgttaaagtttcacatcaattcaaattaaagatatgaccaaaataaattatataagtgagaagtaatcctaatcttacaaatttaagattgagttagatttaaattcactttttataattatatatatatatagacacacatgacatgagacattaatattgatgcacagggagagaggttgtgttttatgagagcccgaacccttcagtagggattcatcgaatcgtgttcgtattgttccagcaattgggcagagacactgtcatcaccccagaatggcgccataatttcaattccagaaactttgctgaaattaataaccttgcacctgttgcagcagcttatgccaactgccaaagagagcgtggttgcggtggaaggagatattaacaagttcaattaatgaagattcttggatgccttactccagctgatactttagagaaataaagacagaagagagaaaaatatatatagtaccttaagtaatatgatgtaataaaaggaaagataaataatgataataataataatgataataataataatagatgcttagtgtaatagaatagtagcactatcatcaaataagttagaagagtaatggagaaaaagaataagttagaagttaataaaatctctccttttttaaataataatttagagagaaggtaccatcttgcaatgctagagcatgccattcaggaacttcttcaacagattatggtagcaacggaaaaaaaaatacaaaaagttcatgcatggttcatacatactacagggatctcatcctgtattattgtaatgtacgaactgttattcattttaaacaacgtttgcttcaataaattacatacaatattattaacattttaccctttcaatttttttatgatgtcctttcttttctggctatccttgttttatatgcaaaaactttaacgtgttttattttatcatgaaatacatcaaattttcaagtgaatcaatgatgaggtgtttcttaaactatcttcacgtacgtttgaatttttttattatcagagaaacgtatgtacgtttgaatatgtgctttgctattgtttgtattttaaaagacttttttattttaacaacagcatgtgtacgcaactgagttaggagtagttatcaggtaaaattctcttcatataaataattttaattttttaatattaaatatatagtttattttaaaaattaatactgagtctctttaaatctttttcagtacatacttctctagtaatcatacgtgcatatggatttgatttccatggaaacaatggtgctttaaatgtagatgagtataatctgtaaggagtaaaaagttatcttatatattataactcgtcgccaccctttagtaccgcnnnnnnnnnnnnnnnnnnnnnnnnnnnnnnnnnnnnnnnnnnnnnnnnnnnnnnnnnnnnnnnnnnnnnnnnnnnnnnnnnnnnnnnnnnnnnnnnnnnnaaagaaaatttgaactttaaaatatgtcttaactttaacgtgcttatgaaaaatctttactcaattgaacttttataaatcgactaaaataagtgtctctaaaatgatatgtttggtaggagagagaaaattatatagttgagacccacgaattttgggtatatcaatgcaagaaatggttaaaacttatttagtcagctataaacattttttggaatgcttaaacatgtttcttgaagaagaaaaaaaattccgcgcttagtttcaatagaacatttttaaatagatatat

SEQ ID NO: 292 - DNA, 4779 bp, Glycine max
aaaagaaccaaaagtactagaattagagacaataagatatcacaaagctgcccacctccgatgcatgaccgcccactaagactactaagctattttgagaagtagcttctcatagtacacttggtgtgtaatttattgttttacttccaagtttagaaaaaaaatttctttcttctaacgtacttatgatagccaagaaaaagctttagcaaacaacagcataaggttgtgtgtgtttttgtgcaaaaaaaagtaatatttcttaagagtcactactactcaatccctcttttattgtgactctttgttccacttcaagcttgaatatattaaccctcatgattttaacataaatctcaaaacatgggtacccaaggtaccttgcgtaatacactagaagatattactgtaactacgcttaggtttatagaaatgtgaaaatttaaaaaaatacaaaagaacatcaatatcatgcggaaactaaacaattaactatacaaagatagcatacattttatataatgaaaaatctagaataaatataaataatttaaaatttaaaaaaatgtactatttaaaattgactaaaatatgtttttcattttcgtaaatacgaaaatattcaaaattcgtctattcaaaattttcaacacatttttattctcacaaaattgaaatgcataactagtagtgtaaaaaaaaataatacacataagtttggatgttcgaaccttatttcgaaaaaaatgatatattttaattttgtgagaaaaaaacactgaaaattttacagagacgatttccgaaaattcatatttatgaggaaaaaaaatatgttttaacctttaaaattttattttattcttttcgggaataggttccaaaactcacgcgtgctttcaatacataaaaccaaaaagattattttccagacaatagaggtgggaatatcccatcccctcgtccttcactctgtataaatagctagctatgtgggtgttgtagtacaattgtctttgacataaaagcatatttgtgtttataagcagtgtgactcagtgaagtgagttagttaattatgcctagtggtagtaggaaccctcttgttgttgggcgtgttataggggaagtaatagacccctttgaaagttctattcctttcagggtgacctatggtaataaagaagtgggcaatggttgtgagcttaaaccttctcaagttcccaaccaacctagagtgagtattggtggagatgatctcaggaaattctacactatggtaattagttacattaaatagttatcatattatatatttacacacacacatatatatatatatatatatatatatatatatatatatatatatatatatatatatatatatatatatatatatatatatatatatattgctttactaaacaaattctgtttaatttcatcttctatcaaaggtcatggtggatcctgatgctcctagcccaagtaaccctaatttcagagagtatcttcattggtgagtacatgccttacgtatcgttaattagttgaaccaaatttatatataagagactttagttacgttacattataactaacacccttccctctgtggattttatataggttggtgactgatattcccgaaactacagggcctaatttcggtgtgtgtatatatatatatataggttacttttcccattcatttaaaatacaaataactcccttaaattttaagttgattttaaaaagaatattaagaattagggttatctttattattattatgagtgtatataataaaaatccgatacattatactaacatttttatattttttgttaaaaaagcctaacatttttatattgataatatatatttattttctatactaataaaattgtctgttagtatgatttgtcatacttttattacagacttccaatatttatactaaggatttatttaattgttagtcaaagattatactaacatagattaatccaatgtcgtatactataagaaaataacttttcttttatagtaaattgaaataagttattttcattttaactataaatttatttatcaggtagatgtttaattagttttaaattacccagaccgggacaaacattaaatagtataaaaatattttctaaaaaaataacttaatggataattattagtacgtctaatcaagctaaaagtcagcgtagctacaatatacaagcattgttaacccttttcttttttgttaaaaattctcttgtacgttatacttttcctttgaggctttttctttgtattaaagaccctttatacttttctctaaataataaatgaaactttcgtttagaacatagcagaaatatattacaagaactcatataaaacaaatgccaaaatacttaattttataaattatattacaaattaaacaagtgaatgagcgtgaaaatgtaaattaactctataagtattaaaaatatttgttttcgtatgtagaattagttacttttgtgatatcattaaaaatgttatgtgtaagatagattaatatagagcttttatatttgtacaacatttttttaacatcaacactgattttttattttacttgtttatattttgttcgcatattacgtcacaatcacaagattataaaaagtgacatgaatatatacaacacccaaattatatattcaatttgaatctgctattgaattgtatacattgtaatttgtcgacaagtttgcgttaccacaatccgattttggaacctatcacatcatgcgcgaaacactagtttcaagaaaatctcttgtcgtgcagggattggtgtataaaagtattggaatcatttgtggccaatgtttcatgaaatatagtacatgaaatacaaatagtgtgtatatgatgatgcataacatctcatgcaggaaattaaaaactgattccacgaggcatcaaattctagattacatgcgatgagacaaatgacatgtctcaaaagatatacaaatatctaattccaataaaacaaatctaacaccaaaatatgctaaattacgaaaatgcaataccagtatgagtcgtttataaatatgttaattgtgagtttgcatgatttgtacgtatgtaggtaacgagatcgtaagctatgaaagcccgcgacccacgatggggattcatcgtttcgtgtttgtgttattccgtcaacagtttagacagagggtgtatgctcctggatggcgacaaaatttcaatactagagaatttgctgaactttacaaccttggattgccggttgctgctgtcttcttcaactgtcagagggaaactggctctggtggtagaacattttgaataaaaaattattataccaaaagtgcatgtttaattaatgaataatactatatatagcgcccaaataagaaaggtaatctacatataataacactcatgagtcacatacacatgaatatgtaaccgaagcactcatatgtaccactttattttatgtagtactattatatagttatatcaatataaatatagaatattaaatatttaactagtagatcaattccctgatcctccaagtggagctttgggatcatggagtttgtcaagtgtcaacaaaatatttattttattagatatttaatgtattttttttattagggactcaattttttttaatttatcatatatatttaagtctattattcaccggagtccaataaaattgaacaattgaagctgaagctcatgcgtattgggctctattactgtcccaaagtcttgccttagtctttgactcttgtcatatgaccttcaatttcatgcaaagaatctctagggtgagtaatcaattaggtctcaatctttataatgcgcaccatcatggggtttagggtatgtgaataaattcatgaaagctgaaaagatagagagaatcaatcatgaaagatggattcttttgatgcatatatggtggggttgaaggaggggatgacggatgaggagatattagaaagtaagaaaaaggaacgaatgtcttttgtttgtgaaaataacacagagagtgcaacgagaaagataagaacgaaaattggtacgaattattcgctactggataacatctcattatgaagaacaagaaagctgatagaggtaaaaagtatatgggttaccatttcagtaaatggttaaaattaagttaaccagataatcattcattcacgtgcacagaaagaatttggtgtgggtacgtaagtatatcatactttaataaaagacaaatctaaattttaaaggaggcaaatgttaacagattttctttaaaagataaaaagagttaaattaatcttataaaaatatatgcaagttagagataacctatatatagttaaattaagaataaaagaatcaaaaaatgatgctggttgtcctaaggtttatcgcatagcatgtggtacaaaagttaatataaattctaatatatatatatatatatatatatatatatatatattagttttgcgagccttgtaaaatttaggatctaattaatcataactatatccttatctgcacctcatataaattatgctatattaaaaacaccattcctcatactcttgtaaattttaggttatacgtaaaatgtctggcctaattagcaaataaatgagtactttaagtatattaataaaagttagatatcagaccatatgtacatgatgatacccaaaaaaaaaaaga

SEQ ID NO: 293 - DNA, 7843 bp, Glycine max
agtaatagtcaaactaacatgataaccaaaatataattttagagactatttttttttattttttttagattagagattacgggtgtttcataatttattggaagactaattttattaatgatatgtgactacataaaatttaacataaggtggaaatcaaacatgtattcattaaataaattattctcaaacatataaaacaaatatctctttacaccattacaacaatcctttaaaatatttttcaaatttttctcaatctaagaattaacatgacaacggataacaaattaaaatattaaagtgaccgattacgcttttattattacttgcaatgacccaattgtacataggacgagtcctaatttgaaaatatattacctattatgctgttactcttgattgggggtataatttctcattctaagcatatttaatctacttacaattggatcatatattgtagattttaacccctcacgagcctttaggttgagattgatttaagtcgagctggattgatcggtctagaaggagcttgattccttggatccaaaataaaattaattttgataaaaaaaataatattaaatataggtgaactatgtattttatgaagaagtgaatgtttcagtaaaaaaaaaaaaatgaagaagtaaattttgaaaagtaatatttttatgaaaagtaatttttcagaaaggtaatagtaattgaaatgatgagagtcaatgcggggagtgaccttgtgagggccatgcgtgtggggggagtggaagcccataccgttgcaaagagcaatggtgaagtgaatcaaagtagcaaaaagcaaaagcaaggtttgagcggagcggaacgcaacgcaatgcaagtggacaaagccaatttattcacccaagaaaccccccaaccccaacaaaataaaataaatacactaaataaaccttaaccgataatattagtataatgatgtaaaattctatagcatttatataacaggagaatttatttgtatttggagagaagaagaaataaagcttatagttatagtgagaagagaaggaagattagttgctaataattaagacagaaacatacgtggcagcttagggttcaccccaagtcctaaaaacgccccctccctacccttcccccatttcccccccaacccaaacgctgccaacaacaacactctctctacaaaattgatggtcccaccgacgagcgggtgtcggaatcggaggccatgaacggcggcgccaccaccgccaccttccgatccatcctcgacaagcccctcaaccagcttaccgaggatgacatttctcagctcactcgcgaagactgtcgcagattcctcaaagaaaaaggtcccttctctttctctctcttctctcctccatgatttccggcacctgaaaaacctccattcccctaaatacattatcatattatttattaaaacattaatcgctcgctcgggatgcgggttttttaaaaattaaatttaacgagaatgatattaatagttaattaattaaaatgtcgaagacacgtgttcgtacagggatgcgtaggccttcctggaacaaatcgcaggcgatccaacaggtcatttccctgaaagcgctgctggaaccttccgacgatgatactcctcctcctcctcctcccgccatgcaccaccgtagccatgctcaacctcaacctcaagtgagttacttactactttcttctttctttcgcctttgcttctggaacctcaaatatcctcgtgtgcttgtaggtgaatttgagtgaacctcctcctcctccgcccaaggctccgccacctgaagaacccgcttttcatgctgctgaagacattcagaaatctgcgtcgtctggggaaaagcctacggaaactaatgacaccaacaccaacgttgctagccccaagtttgtttttctctctctctctctctctcttgatggtttttaatgcctttttgtgtgaccggtatagttattttttaataatttttttaaggttttagggtgtggaatctcgtccaagctagttggatctttgatgttgctttcggtactttgtgggaagaaaatagtgtggttggtaaagtgtgctttggagttcagtgaagagtgtaggttggttaaaacttgaaacgttaaggtttgcttttttaagtggattttcttttggcattagcttggaaaattggctcattgtgttgtgttatttattattatttttttctttttcgtgaggtggaaaatgatacggacggtgggtttttggtatccgttgaatgtgtatgggtggggaaagtggaggaaaagctgttagtgaactagtcttagctcttaggtatgtttggatacatttctccataaacactttaggtgaaaaaaaatagaaaataaaatgagttggacttctactataagctaatgttaaattttatataagctttcacttttaacaatttaacttatcctaaaactgtagtgtatataggttggttttagtttatgggagaagctcaattcattttatcttcttattttcgcctatcatcagtacctataaagaagtttatcctaatagggccttgaaacagtttgtatattcctgcagtttaagaaaatgttaggtgtatttctgggatcatgggttggatctttctgactgtgaggttaggaaaaggtttatggccattaatttggatgtttggatttttctgggatgtattaggtgggttctttgttttttttagcagggttggttttattttttgggtcggggtggggagaagaatgattggaaagtgctaccttctagaagcactaaggatttctgtccaattccaaacaaccagtcagagcatgcgaagcaaatatctgttatttccaaatctagatatccccataactttaatattgttgttattctatatttgttgcattgtgtttgcactttgttgactaattaatatttaattgttgttttttgttttccattcatgtttgaccttatacgattgtgtcatactactttaatttaaaattttctctttagatatcatgattgaggtggagaaaggttcatgcggattaaatacgtggcaaatatcaaaaggaggaaggggaattctttaggtgtagaagtgattcttttaggttttaacatcatgaatttcaagattcaaggagtacaaataaataatagtgaagtttccatccataagtttgtgttggtatctatgtcaagtcttgtttccttattagtagcatccaaataaatgaacctgtttatttgtggataaccaataacccttgatttcagccatggatatgctaggaagtcatatgtcttgttgatatggaatacctgggagattttgctttcagctgcagcaagtggtaatcatacctagctgaaaagaaagctgacatgagtattataattaggtattagggacctggatgaaaaaatagagaaaagaagagaaagatttaatttcttgattaaaatgaacagaacaaaggaaaactaaatctcctccaagggtttccccttgacgaagggtttctgttttcaaaatagaactaatgctcagttttccaaatgataacaaaaacgtaaggaagcctcttcccttgtatccttttttttttatcttattatttactaaccccctctatctatctaactaactaactaactaatattccaactgtccctaactaacttccccttcccctctgccttaacgttaagtgttatagatttactcaagtgtcttcccagattcatgtttaaattaaaatcggctcttgtgcagttctttacaaaaataggagtccaggatagtaagtgtacaaaactttcattatatagttactttccgtatgaatggagcgatttggtaacctaaaatgtcagatagtttaaattcaatacatttgcataaaatatacatgactggtggcaggccagtgttccttttatgtagtattgtccattcatactcttaacattacttacaaatgtggtcatagagggtgtgcaactagtggatcatttgggcaaatgacaattttctattgtggtaaggtgaatgtctatgacagagtctcgcctgataaggttggtaatgatctatcctcttgcatcaatagctggccataatccaataagacttcaccttccaatgcaaccttatttggatttgcaggcacgagcaatcatgcagcttgcaacgagtccagtccagcttactcaggatgatcctttaaatggaaatgcagctgtttggacttctccttgccacttaccgatggataaggatgtcctcgttcctgttgatactacaatccttcaggttgctcaagcaggtagcaagtgggttcaaagattgcttgattttgctctgaagtagtagtatgaagtactttgatgtgcaaggaaatgagtcttcttcagtgcccattgcatcaaaatctggaattcttcaaggaatgatctcatctgatgagcagatgaagaaaatgattgtagcctttttattagcttaactgccggattcaatttatttcttaaaagaggatgcagtgctaagttgccttgctatgtcttacagaaaaaaatcatgaaatagggttcaagctaattgttgctttttattttactatttcatgtgccatgttcgttgagtttttcatgctattggttgttcctttgctgtgcatgttgaaaagtattttgatgtccagtcattaaaatgaccacattccctctgaatgctgattttttgaattatagcctttgagtctgtgtgtcttgaagatggacaagcataacatctttgacttgcttaaatcatgataacttgcataatttgaaattaaagatgttaagatccacatatttacttttgtgatattgctaacttcataattggtgttccgaattgttttttacagataagatggtggagtatcctctgcaatatagggagaaagggagcatagctcgtgatgctggtaagtattattaactgtttggaattttcagtctgctagaacttgttctattgtgaggaaaatttacagaaaatctcgaagtagaaaaataaatttctgataaactagtgagctgaatttggacccatgctacttcccttattgaatctctttcaacatgtcctacccatttcttttcactgatttggcaagtctttggagacccttttttgttttttttcctaggcataccaggtcattattttttttaatcaagaaaaacaaaattcgccaacttgatttaagtctctttcttggataaaacacaatggctttgtttgatcattgtagtccatggaaaaacatgcctggttaacagaacttcctgttctttgtgaatctaaaagcaatgaaatatgataaaatcttgtgggtttgatgtactatatcatcacaactttaatgtcatatttatgcacccacatggcagcataatattcatcttagattgcaagtatctttatgagttacagagaattgtttaaacttcaaagcattgtaataagttttcatacatcaaattcctagaacacaagtattcataatatatgtatatatctgtttcataagatgtagagggtcaggaacaccgaaaagtgtcattgcaacgatatcttgaaaagcgtaaggacaggtatttgcagtactaaactgccatttgtttatagacatcaatttcatccattttgttacaagtgtgtagtttagtgatagtctgctgaattattctcttaatctgccctgtatgttaggggaagattgaaaggcaagaaattgactgggataacttcatctaacttcgagatgtatttgaaccttccagtgaaggtccattcctcaaatgggaattcaagccgtagcagtactagctctccaccacaacctagactgcctctagtttccagtggttcagatcagctaaaggttgcccttcccattgatctcaatgacaaaggttagttgcaatctttcttcaacgttaagtaacaaaaccttttttttccttacaagaatgtgataattagtcttaaagcttttaagattatatcagagaaatataataattgaattgaatctgattgtcctgcttgctgtcttgatatttggggaagtgagatttgcaaaccatctgacaagcagtgggggttctttgtgtgcaatgcttccaagacaaccttataaaccggtgttaatcttttacgactagtttacaaagtataatatttgtggtggtgattaaaaattaaatggtgaaccaagatatgataaaccgtcagcctcgatactaggttaccatttgttaaacaatattttatgtcatagatttatgttgtctcagtgtctttgcagatgttcaagaatgctaaaattcaaactagatagattatgcagagttgggactcgtagatgattgaagagagatgacgaaagtattataactgaagagaccatagcgtctagcagcctactgcaagaattggattgctcttagactggtcaattttagtatatttaactgtttgggcaaatttcttttgtttaggatagtggagtgtcctgcctacctgatcaattttgtaatctaatttcatccttcgggaatatcttgttactgaagttttaaggttttatgagttgaaatgtagagccaggagcagctattttcccaggaatatatgatatgtaaattcatcgtgctgcctcttgttaaatgttaatagcttttgtgcaagccaaactattctcttactcttcttatatcttatgtttgttcactctagccaaactattctcttactcttcttatatcttatgtttgtttactctattggtgctgatttcgattttgtttcatgacaaacaactttagtaatttcactgaacgttgatattttgtaggataaatctgtcacgctatactgccattttttttttttggccacagacagttttttttaatcttttatattgatgtgaagtatttattaattttgtaatgactggaaaatttgagtttaatttatatcttaatttaaaatattatatattttttgtgacaggaaaaaacttgagaaattatataaatgtctaaatttattttgtcacgcgatgtaaaaaagtgatattctggaattttaaacatttatctgccacaaaattagataaagtttacaattgggcgcaagcactcaaacaatctgaaaaaaaaaaaacccgacgataacgatattctttttctgggtggaaacacccgccacacgtacgtacacaggtcacgcgacggaagaagagatggtaaaaaaaagaagaagaaatatatgcgccacaataatgtcatgtggtttttaattaattaatttttttatgtcttgggataataaatatataatgtcactctgaccaattgcaattcagatagagagaacgagccagagtaagaaaggagtgtcattcatggcgattgaggtgagttcttctccatgaagtaatctgaatctaagtttaggacttattgttattaataaaaagtcgtgacatgacatgataggcatggttgatggacgatagcaatgaagatccaaggctttctcaccgtcgcaatcccaacgaatcagtttcattggaccaattagcaggtgagctcatctcatctctccccctctctaattttacttcattctgacgtttctggtgaattttgcagaattgggtgtgttatactggaagctcaatccaactatctatgagaacgatcaag

SEQ ID NO: 294 - DNA, 7075 bp, Glycine max
atgaatttctaatgcatgatgggaatgacagatatgaggaatatataaaggtgattcttatatacattgacatggatcggaatctattaacttaaagttattggggtcgtgaaatttatttaatttttctaattcgtgtcacatgtcacgacaattagtggggaacatttatgtatatagaaatttcagaaatttctagcagcgtgataaatataaagattttggcacaataagtttttggatcataatgagtttctatttaatcaaggcatgtaatctattttattatttagtagggaaactgaaaacttagggttgctatttgtagctcccacccttcttagttcttactcttttcaatattttttaaaagttttatataatacctaaattgccctcctcctcaccccattgctcttccgttgctcctccatgtgagttcttgtctttttttttctctggtagcgttttgctgctccttttttcactcaagtgttgccaattaattgacaaaaaatggtttctgtttcatatagaaactatgtttttgttgtgtagtcatacattacggaatctagtttccattaaataagtaacgtgaaaaaaaataaaaggtgaaatatatattgttggaaaagaagctatgaggtgcaagaaccgatcacatggagaaggcaatgaaagacaaggaggagcaatggaagagagaaaatgagaagatggaagggatgtgaaaatgtttgaaaaaaacgaggtgatcagttttaaaatacgaatttagtattttctttttaagaaaattctttcggaaagtcgtgttttaaaacatgacttttatttatttgaagtcgtgttctaaaacatgactttatttcatatcctttaatattttatatccttaatatttttaaaatttatccatttgtaatattttttaaaaattgacccatatatgtaaaatacccgtcaagatctctttattattttgaaagcgaaagcatatcacttcaaacacaatggaatcgaggctattgactaagtataaatagagaagacttcatatcggggttcataattcataacaaagcaaacgagtatataagaaagcataagccaaattttgagtaaactagtgtgcacactatcccatgcctagtggaagtagggatcctctcgttgttgggggagtaattggggatgtattggatccttttgaatattctattcctatgagggttacctacaataacagagatgtcagcaatggatgtgaattcaaaccctcacaagttgtcaaccaaccaagggtaaatatcggtggtgatgacctcaggaacttctatactttggtaactcattaattttgtccaagtactctttttgttgttcatatttatagtgattttaaattgtagtagtaattttttataccaagctagaataatttttgtgagtttttctattgaaaatataaaactttttttaatggagaaactctcaaaaactcttttaactttgtattcaaacaatctcataattattagtaaaaaatttaaatatgattttagtttcattaaaatgagcaaattttatttttaatatttgtaaaaagaaattgattttctttttctttttctaagaatatgacgttattgtttttgaccatccatactactattatatgatatagcatccattaattgtttgtgtttaagggaaggtcaagtaccctctcaagtggacatgtacatacatgtgaggacacctttataatattttctacatcccaaaataaatagtattatttatctatctctttttaatgtattatttatgtatcttaaagtaagttagggattgaaaatattgatatcttattttaaaggaatgaaaatcaatcattttagaaaaattaaaactaaaaatttgctcattgcagaaagtaaagtaaagaaaaccccaccactcattttataggacttaaagtcatacttaaaccttactaaaatttcaagaattgaaatacggatacaagcagttaatgcaatatattcttagtgcaatcgaggatcattagatgttacaatatagtagtagtttctagcttaatccaacttgatttcatttcattttattaacagattgcggttgatcccgatgcacctagcccaagtgaccccaatttgagagaatacctccattggtgagccacaaatttttgtttaaacacgccatgaatgcaaacatatatatgaactgaactatacatttatgagtttttctagcttaatgttgtaatattatacccctatcttctctcaatgtgtcaggttggtgactgatatcccagcaacaacaggggctagtttcggtacgtatatgatgtttttccatttttaaaacctataattttctgtgcttaaagttaaacctattcaaaccattatttttaatttaaaattagtgagttttatttatgtgcatatactgataaaaaaaattagttcacatattgtatttttatgtatgaagtctattactggcttggtctgaacaagtaaataatcatatatcaaaacaagaaaaaatattttaaattaaagtataattgaaccaagtaaaatgcatgctattagttaccaaactaataagcacaaaaaataaaataaaaactgatagaaacatgattgattacttattcaaattcaccctcgcttgtattctgtgtcaaacgcacaatgtttgcttgctagctgtttaatttctttaacaaatggacacatatgctaagtgtattagtgatttatgatttctaattatttaaattgataggaactcagcttttcaaaaacattattattaattatcttaactgacgaaggtattagaaattttattgaacactgattcctaaactcgtaagttttggaatcaagtgtgttatgtgataataagaagatccccattaataattattttactgagtatatatagtggaagggatttaaattatggatattctacaaggttccatcaactttatcttaaaagtttatcttttgtcctttggagcagtacatctcctttccaacaaatgaatgatgttcgagtttatcaaaatataaatgtggtccaaaatattttaaaataatttttatttttttgatataataaatattcttttttattgagtaccttttttaatttatatctataattgttagaattattatttttatttaattatattagagaaaaatgatttagttaattaagagttaaatctccagtaatacaccccccccccccccccccaaaaaaaaaagtagcttaattttaattcattggctaacacaatgtgaaatactaatgttatgttgaaacggtgcatgcatgatgtatcaaagcatgcgttatgcatggatgtaggaatgctaaatgtggactgtgttttccattgactagtaatttgagactaatcctatgattatggtcaggcttagtgactaattaaaaagactctcaacaagtaccttcttcaaggttcgaattttgttttatttttaatttttattgccagagaatccagcttacaatcacgccaacctttaaaatgaagaacagatagagataagtatatgatactagggcatcatattgtaaagtacgatcagcaaacctgatgatgaccaacatacaatcccaattaaaatcggagattattatgatagatatttaagttgtttctttgtttttttttttataaaaaaaatctttatacaaaaccaaatatgcatatatatatatatatatatatatatatatatatatatatatatatatatatatatatatatatatacagttagttatacatgtgtataaatacacacaaacatacatttatttttatatatacatacaatatatagcagatactcaatattgaaaattaatttttgttttgatgtttcaaaaacgtttttattggttttaatcttcatatacaaatattatttttttaaatgcttctgtcattactttgtgataatatatgacatgcatctatatatgttacatcaacaaccatccttaaataacatgtaatgtaacatatatagtcatcgatgcatattacacattatcatgagtgaagatacaggtcatttaaaaaaaaatcaaatttatgaggattaaaactgacaaaacaaaaattgatagacataggttacattaattaagccatatatatttacaagaattaagaatatatatgttttacctgattattaagattcaaaatatgcaaccaaattagccaaattatgaaccatataagcattgaagtcttgtttaatttctctcttccatcagaactcaagtaagaatatatgtagccatccgaattcttaaagtgcatgcatgatcatgtgcaaaaagatgagaagattcattcagttcaagaaaaaagacacaaagcaactactgtgactaaaggagaatattcctattgaataaactaccttttgttggcaagatagctctaaaaccttcataggatttacagagttatagaacatcatagaaaaagcttcataacttgttgaagcaaatttaaataaggggagttaaaagaataagaattagatttgtttaaactccatttccaaacatcttattgaccaaaactcagcatcatatataattcaataaattcatcaccttgacaaaatgtgttctttctaagtgaaaaagaaccctcctccatttaaactttcacttcaaccataccccatcaacctactcaccaaggtaagcaatcttaacatccttctcatctgaaataagaaaaattcctctgatttttttaaagaattttgagatccatcatctctagtgaacccccaatctttccataaaaaaagaaaaaaaagaaaaatattctgcttccatcatctatctgctttttaaaaccagagcttaccagtatgtatgagtgtttctggctttctgccctttgcagtacgaaatgctaagatatttccactgaattgaaattacgtgttcccatttcctatttaatttccttagtttcttatctcttcagttagaggatgacacgtacttaattaaaatcaactctatcttctgattgctattatatttttgaagtattattttttaatttggaagagagggaaaaggacacaagattaggtgatttggctcctttctaaaacgttaggacagcagtagtaggaccatacatgtctgaacattattaatacaataccttatctaagaagaaatatagtactattttatgtttgacaatcaaactgaaatatattatcattgcatgtatataaatcataagagtttaatgagcgtcaaagtagatcaagtagaaatcacatatatataacttttaatataattattataaaaattaataaatttattgatcatataaaattattttatattgtgggtattgtaacgataaatatgcattatttgcaaaggccatgaggttgtaacatatgaaagtccaagaccaatgatggggattcatcgtttggtgtttgtgttatttcgtcaactgggtagggagaccgtgtatgcaccaggatggcgccagaatttcaacactaaagaatttgctgaactttacaaccttggattgccagttgctgctgtctatttcaacattcagagggaatctggttctggtggaaggaggttatactaagaaaaagtactttatattattgaaaaaataaagtagtataagcttcgttgagggtttcagaaatattaattggcaatctcccacactctttagtagtaaatgagtgtttttcaacttaattaaactgagcatacagtgaaataaattgctagctcagttggtagcagcaagtactctgcatatacacataaatgaaactgaagcatctaggttcatttttcttatttgtattatcagttgaagaatgttaaagatatctgatatacgtaaagtggaaaatataactcgagcataagttaaagtgatggagtatttatacttttgcttactatccatgatagtctatgggattgtgctattaacaagtatgatgaaaactttctttagcactaattgtacttaagattagctctttaataaattaaaatcgtttagctagcttatatatatatatatataaaacacgactaggttatattatatgatctaatatatatgtacttgcaaggtatattttatggttatatcttcacttttcaggaaagaaaaaattctctgggaatcacatactatcaagaacaacacataaattttgaataagaaagcactaataatgggaggtttttgtggactatatcttagacacgtagttttcgacttatatataaggtggattcacgtaactttcggatttgtgtgggtgtagaaaatgatcctaaaatgataaggaacatttttacaagtggtccaaaggaaatgaatgaaccaaatataacctcaaagtcatcgagtgcaagatatgaaaaatgaattgaagacggattcctgaagatattgactggaatatatatatttctcttgtctgatatgtttcaatatcatgttacaaatattgttctccgactaattttcaagtattatgaaataaaatacatttcgtctctaaccctaatgtggacggaatattgataaaatatcaattgcataaagtaattagtaattacttttaatgggttcatataaactgcattacaacttaattaacaccgtggtgaaatctgattttttttaacatgaagttaatttatacaatatgatatggtcaacaaagccattgaaggaacatgcatgtgcatcagattttctcatgtgtaccaaaaaaggtttatttcaagatgacatatagcaataagtgaaaactaaaaagccaaattggtatagaaacaaaagctggtctcccattttttcttcattttctgaatcacggatatatgaagtccaataactttactcttttatcggagacttataaaacataggaaa

SEQ ID NO: 295 - DNA, 3753 bp, Glycine max
atgagttgaattctcatagtataaatatatgttccgtttgctgcaacgaagagataatgcagcctacgaactaaatgtcgtagttatataattaccgttcaccacaatgaagagataatgtggtctatgtgcacatagtagaataaatgcttaattatttaaagtaattgtgttgaataccagattatgagaagttctgaaatgtatatactttgcatacagtgatttctaaaagcaagtctattttcgttcattgctttcaagaatgttattttaatatcttttgggaaatggaaagattcatgttaaatggtgctctctttcatgtctgcttagtatattatgctctcactaagtccttgtgacttaccccttattttacttcttttctcagatacccagtagtggagtaaccgatttcctgggattcgctgacacacccaggaacttgattatctttttggtaggtccccattgtgtctgatggatattttggttgtaactctagtataatgtagctatagggaccagggtagtactagatttagaggggactcctttattttgggaatgtaaatgactctcctttatagatatgatgatgatgcacttgtgatgttttgagacacttgatgattagtggttataattcactttgttattaaatggatgagatgagatacaagtacatgaaattgtatatatatatatatatatatatatatatatatatatattgtgttctttacaggttaagttgtataggataggctggccagactaaagaagacatagtctgtgcactggtcatgaccaagagtgcgtcatgacaacattcataattttttgccaagaatattaaaattaactttggcaatattatgaaccacacgtttcaactacccggaggttgataactggatccccatcaaggtggaggcattaatcaatgcaccaaatctggtaatcaatccagacacgaagcattatctaatataccaaaactggtaatagtccactctataaccaccattgatcatgcaccgtttgagcaagccaacatccataaggaacttgcagaaacataaacaaaaaagatgtcttgtgaagttgtgaacaatgatgagcttcatgtggttatgttcccattccttgcatttggtcacattaacgcatttgttcaactctccaacaagttgttctctcatggagttcgtatcactttcttgtcagctgcatccaacattcccagaatcaaatcaactcttaatctcaatccagccatcaatgttatcccactatacttcccaaatggcataaccagcactgctgaattgccaccaaacttggctgcaaatctcatacatgcacttgaccttactcaacctcatgtaaagtcccttttgttggaactcaaaccccattatgttttctttgactttgcacaaaactggctcccaaaactagcttctgaacttggcatcaaatctgttcgctttgcgtccttctctgccatatctgattcttacattactgtgccttcaaggcttgctgatattgaaggaagaaacatcacttttgaggatcttaaaaagcctccaccagggtatcctcaaaactccaacatttccctcaaggcctttgaggccatggacttgatgttcctcttcaaaagatttggtgaaaaaaactttactggttatgagcgagttttgcaaggctttagtgactgctcattaatagtgtttagatcgtgcaaggaaatagaagaatcctacttagactacattgaaaagcaatttgggaaactggttttgttaactggtttccttgtcccagagccatcaatggatgtgctagaggaaaagtggtccaaatggttagacagtttccctgccaaatctgtcatactatgctcctttggcagtgagcaatttctgaatgatgatcaaatcaaagaagtggccagtggcttagaactcagtggcttacctttcattttggttctgaatttcccatccaatctctctgccaaagctgagttagagagagcattaccaaaagggtttttggaaagagtgaagaataggggagtggtgcacactggttggtttcagcagcagcttgtactgaaacactctagcgtgggatgccatttaggccatggtggcttcaattctgtgattgaagctctggccagtgattgtgaactggtgctgttgcctttcaaggctgaccagtttttcaatgctaagctcatagccaaggctttggaggcagggatagaggtgaataggagtgaagatggggactttaagaaagaggatatactgaaggcagtaaaaactatcatggtggaggatgataaagagccagggaagcaaataaaagaaaaccacatgaaatggaaggagtttttattgaataaaggaattcagaacaaattcatcactgatctggttgcccagttgaagtctatggcttagtgttcaggattcggatttcttggactataagctatcatttaaaatttgaactgttcgatcgtgtattagttgttttgtgtgtgaatgtgtgtgactagtttggtcagtgctcattttcttggtctattctcttccaatattaatgtaaaataaagtctactaagactaatccattttcttagtctagtctcttccaatgtgtctcctttctccagattctactgtagttataataagaccagttagtgcatgaattctctaaacaaacatgcagggtggataattcaccttagaagtttacatattgctttatgtaaattgagaatatcgagttcctaatggttgaggtcaaaaggaattgaatgcatccttgcttaattgaaatcaaggggaaggctggcttgtagtttttgcaaaaggtttgttttgaaaatttgaaatgcaaataaataaaaataaaaattgtagaaccattctattgtttgaaatatacaaattaatggtttggaatataggatgaacaataatggggacataaaaatgtcacaatatattatttttgtaagatcctgctttagttttaagagtaagcacgtggaaaaactaaaacaacgttgaagtacaaacagaaatgcacttttcctttctcgatcagaatttttttataaaaaaaagtccttagtaaatacaatatactaaaaatgattagatggttcatcagccaattacagtgctcctttggtagtcactagagagacattctgagtgatgatcatgttgtgatataattcaagaggtggttgttaaagcagtaattcagtttagttgtgagagttcaatataaataaacattgtatcaacgttgccatagttaggtcttattataatttattctttttcttattattacaatgtgtttttgagagtttttcacaacaaatcgataatcagagctctcatttgatccgataccagcatacttttgcagtgtggttgaatctgagaagatcagtactggttatgactggtggaatggaaactttcctgtgaattttacagttcttcactgaaagaattaggaaagagagtgcgtaaagatgaaggttcctttaactttcaaattttgaaattcaagcaatataatatcaatggaagagagagataagtaaaaaaatgaaaaagagatagaaaaataaaatagatcacatacacttattttctcttggatttttttcttcttatctctcttttcttattacatcaattc

SEQ ID NO: 296 - DNA, 14794 bp, Glycine max
aattaaattacctcctgcaattcctctgagtttggggattcggcgataaagcggcatctggccaccttcgaaacccttcctaacgccaggtccagatcgagatttctgacctctcatcccaaaaccacaacttgccccttgccctgcggatattcctctaccctttctcttagccctcttcctcgaacccggttgcggccccaaattgtccagccgaaaccgaacgccgacgctgggtgctgtcacgggggaagatagagaggcagccttgttaaccacggaaatgaggggtcttgcttgctgaatcttcttcagccatggttttgcgaccaaggttttcaccgttccctgcaatccccaaattggtgagaatagactagggagtttgaagaggaaaaaacagaatgaataccttgaaaggagaaagtggccgccaaggcaaccaggaaactggaatcagagaagcactgcccatttctgtgtggccgattgatacactcactcacactcaccaacagaacttcaaataacggataggataagtttttcactttctcgccttttctattattattaggaaaataatatattaacttacttctatcaaatatcattttttttttcacacaataggtctttttcgtagaagttaattctgtttgattattttaattggacaactatagtgttattgttttatctctagtttcagagcatattattattaatctcaattatgtgataattgatattaatgtttaacgatataggaaaattaaattttattcatatagctaattgtgacacaaaaaaagtttacaaatagcagaacaggagttacataggataaaccttaatgcatacatgaatcccccaccaaattttcacattaataacaaagccttgaaaatagaaaccctcctttatcaatattttttgccggctacaccctctcattctacgcctgcaacccttcccaacccaacgccctctctctccaatgtcctcttcaccatggtggtccaacccctccgacatccgctccctcctccttgactccgccctcctccccaactccgtcgccgtcgacaccatgtttattgatatagtgatatattgatgtgtcagattcagtttaaacttattattgcagataagtgagctcattttaatttaacataaggagatgttactatttcttttaaccctgtaaagtacctatcccaaaattaagacattgtgaaactttacacaaaattaatacattgtgaaatagaaataatttttctcttcactcacaggtactatagatccaacgtcatatgcatatttaggtaaatttgaatctttagtattatacatgttttaataagggagttatattgatttagggattcatttgtttaagaatctccttgtatgttagatttataatttatcaaatactaccatccgagataaaactatcccttataatatttaaggtaactttcattcaattggtgtggtagtatattattactactttaataataaaaggttaaaatgtgtttttttatatatattaaaatgtctgaaatttattttgtctcttttaaagttgaaatatgtgatatttttttacttaaaattaaatttggacaaatatgaatctttaagtgtctacattgtgtcctttacttacaatttatatatataaacaaattaattattagatcaaaattagttattacaaaatttattatgtaaatttatatgtgcattaaatatatattaaaaattttaatgttatatataataatattaattattctataacataattaatttattaactcagttgattagattgttgtattaataatacaaaagtcacaatttgattattgtgtcgtaaaacatatttttgaaaattgaaattacacatgttgtctagggtgttccatcaatttgcgctgggtgcggaaagaaaaactcttgcttcatcagctgtatatagcccaaccgctacctctttcccttgattgtcgttttgcgtctacctttttttttttttctttcttttccggtgcgttgtgtttactttagttactactccatgtgctgttgcttcctgcacctcctttttttcttctggtatagccaatccaaaatataaaattacatttcagaatgaactccttttttgaattccaaaagttaaaaaagaaaaaacaatataaaaaggtgcagaaaacaacttgaaggcaaacatgatccataaaaaaataaaaaaatataatataacatcaacatataaactaaaagtaatattgaaataatttttcaagttcatttatataatttataataatcaatttacataaaaaataactacacatacatgacaaatgcatgaaataataaaaaatattttttaataataaatgagtatttttagggtggatagtatgattccgcttctacccagcatttttgtcatcttgttgttcatatggaaaatgaactaatatttgcctactccaaaatatgcgcattcccgtgaacttaaaatcaaaaagatatttctgtaaaaaaaataatatatcagaaagacataaactgataaacagaaaatgcaattttatttcttaagtttcgaatttctgttaaatttacaattgaatcatttttagcccatattttttactagtcgatctggatctattagtaagctaaggcattggtcaaaatcatgaattcttaaggcccgatagttaatattctgacttccactttttctattcacactaccactttttgaaaagtagtaaaaatagacaaaagcatccctctgcacattttacctacccctttcccttcccttttccccattcttcttaccatcatttttccttccccctatatttttttttcattttttatacacaaggagaatacgattttgttgtgttctagattgagaatcacaacaatcataattttgttctatttttttgttttgaaaaaaatactatgatgaaagtacgattttattgtgattttcaacctataataaaatagaatttcacttccgttgtgttattttttttttttttaaaaacaacacaatgaaattatgattttattatatagtgggggtgaaagtaaaattacaaaacaaaattatgatttcgttgtgttatcttgaggtgatgaaaaattacacaacaaaatcatatttttgctgtgtaattagggagagaaaaaaatacataacaaaaatataattccattgtgtacttgtccaatgaaaatataattttgttgtatattttttcatcccctaattgcacaatggaaataagattccataggtagtacataatggaaacacgattctaattattacttcccacaccacattatattttgaaaagtccaaatcaaaatacaatggaggcaaaaaacaataaatgaaagtacatggctcatttatcatattataaaaaacccatttaacatgtaaacctagcaataaaatagataatttagagcatgctagggttaacacttaatttgagaataggtttcattttgcaagctgagtttgtaaaaaccttagtcttacttttatgaaaacttggtttcaagtaaactataagtatgcatgtgaaagtatctcttagattaatcaaacatgttacaaaactaagcgtactctctaaactaagtttaagacatcccaaacgaacaaaaccaaactgaaccttgaagatttgttaagttgaataccataattattattgataaaactccgaaatttaatcatataaagttatatgttgatttattgatatcgtgttattttaaaaaaaaaaatgcctgaagagtttgtagggtgggcaggtatgtcttggataagagttgaaacacattttttattttgtgtgtgattatgcttatcccttatcgaatacatttctttcttttgttgaaattttttttagctagtttcattctgccattattcttaatcgaggctgtataaaattaggaacaattatatgttgtccgtcttttatttgaaaagttcacaataagaagataagcaacttatcttaattacatttctttgcctctcagacatcatttgtcataatgaaatgtgattcttggaaaagacatagataaaaccaccgagatcagtacttggattatatatgtagtctctgtaataaactaccatacttatgtgagtcctcttattagacattgaacaggtaaacaagagtgtatcataaactagggatataggctaggagaagggtaacactaacacctctgagtgttggtgtgtgtgccctcgggccttgtgagtgattatgctatgtgtagcttacttagagcataccaattaagggtacttttcggagttggtcatagtactcattttgagtgtaaagatttaagtggtgcattgtctaggcagccaaatcaatgcatagctagccaaaatagaggctcgagattagtttgatgtacaacaagtaggaaaagatgccttcacaccaacccaatcttgatggtttagttttgttaggctctactgtactatgttgagcccactttagttctttgtcggcaaattaagtctacgttagttatttgtggttggtatggaactttattgagaacaaaaaggccaagaggctagtacaaattagctagtctttgatgtttgaactaaagttcgttgaaaaaaatacattaatcttttatgtgccaattttctttttttttaatataagtttgttccccgttgggaatgaaggcaagctacaatcaagaagtgagggcttctggtaacattctggtgaaaagaataggagaaagaaccgagagtggatccaaaagcatatagacacaatgcacgagttctacttttctaagaataaaaaaggctctatatgcaaatggaaactgcaagctgaaaaatcaaagtaactatacagctattcaatcacagaaagtttgaagcagctgaacccatgatcactcttagctagtggcaagcatagtacgtattccagagctatctgatgagaagagtgaacaataactagcgacatccatttttggggtctgcatatataagaccaatcaccctaccatcaataatttggcactgattcgattaactaggtgaaccagtgtagtgtataattgatggaaattgaatgctaatagggtgggatgcagacaattctctgattcgtcttctcatcagcaccaccacttggtacgaagatagtgatgtaaccttcattggttgcatctggtaactaattgtttgcaagtcatgagtaattttccttggaaaatatctgtttctttacttgtccctcaaaaggtccaagtccttttttgttttttatccttatatgtgtctcaaaccactcacaggattcaactaaatttgcatatctttaggtctttaatcatttttatcatgaatatcttttattgaaaatgattttcttgtgtgttatttctacctttgcaagttgagaagatgacaaggaaacaaaaatcatctaaaattaagtggctagaactaaaagtagggcatcttggatatgacaagaatagtatcaaatttgctctaaaccgttcccgtaataaaactagatctactgtcaatgagctaattagaaaaaaaaagcaactaaaataataagaaattaagaagggaattacaatgagttatcataaaagagtaaggttgtaggcatatcctagaacatcgctaatgagtatctaaaatatcgaacgctacgaaggtaatacattacacagaacttggaccataagagacataattaaatcctcctaaaatttttagggataaaaactttattcctataacaaattttagcctttaccattgatagtgggataattttttttatgcatcccctcccctccccccacctcccttctaatcaggtatgttttccagttttgtagtatgtgtcttctaaaaaccttttccagttttgtagcagggaaagaaaattaattggattcactaacaaattaatatttgtatttataaaaaataaagaatcatttcttcaaattttatttccttgtcaactatttttcggtagaaattttttggggagaacaggtattacttcaattcaaggcaagaaaaagttgttcgattcaaataattatcaaaaaaattatacttatctcattttaaggaaatgaatggggtctcaaactaacaacctcccgaatgcataacgaggaaagttttattcatccttaaaaatattgatatttttattatattcatacaacctggagttagattttgtagtaagaaagttgacttattttctacaaaaaataatatttgaggtttaaacttttatccacgtaaaaaaatgatttaaagattttaaatgtatctaataaatatttttttaaaagtcttatgttgcttataagaaaacatatgtaatagccatgaatatttttaatttttttatatagcaggaaattaggcattatctcacatatataactaaacatatgatttatttttgcttcgttttactttgttatttgttatgaaaatggagagaatattaccgaaaaatatcattagagaatatatgtaatagagtaaatttcacttaaattgtcaatacataatttttttttgtaatgatttatttataaattaaaatcagtttcacctttttcgaatccaaaatataatttctttgtgatatacaagattttttacatacaacttttattcataattaatttactaatttataaaattcttttttaattcaattcctaaaaatacataaaattatttattatctttattactcaaaaagtaaataataatatattcaaaacttaaaattcataacctgaagcatatttatattatattaaatactcactaagtctcttgacaattaattaatcatacattaaaacctaaaagaatgcattgcactaattaactagttgcgttgaaaggcatttacttaaaattgtgttttaattactccaaggtttagagatatttttttataacttatgaatataattgaataaaacaaatcgggagcttatctaaaataaaataaaaacaattgatcattagcattgttgaatttctcccatcaatatatatataataagaactgcacaaccccaatcgttcggtggtttggctaggtcataggcaacagagtcatttccataccaaaacaaaaaaggcttgctcgttattaatatgtgaggtccttttctttttcaatattctagtaatgcattcacattgtattttattaatacaaaatgtctacggaaaggagctattttgtgaataacacaagtgaataaaaaagtgataatttaaataaaatattgtgtcaaataagttatagtaaatattcgttaatgtagtgaaaaaacttctttcttgacgttcaaacaagttttaattagtaacattttaaaattgccttatcgatgttcacggccctaagactgatcaactagtcaacaacttttccccttctctttggttttataaagagattaatgagcattttttacactgaattaaatgtaaattatttttgcatgatcgattaagtagttattataaaaattaataaatttattatatatgttagtgtgtaaccgaatgataacataattttttttacaatgttagtttatatattattttctcttcggattatgctgtacagtatttgttgatttcgatttgtttgtagggtggagttagttctattttttctaacgcaatggaataaaagttaaaaatttgagagttttatttttacttctataatagaattattgatgatcgaacttaaattctcatgcatattattttgctaaactctcacgagatcaacttagtggatataaatttggagaaaatttaacacaaaaattactgtttttattcttaattataagatattattaattaatttatgcttattaaaaatgtttgttaatttaattattaacattaaatttatctataactataatattttttaaatttatccttataaacttatacatcttcaatttccatagaaaggaaaagaaataatttaggatattttaattaaaaataattaatagacaagataattaaaataattttataaaaaagataattttttctctcaaaattatgttttataaatagagaccaaggggaaagttaaaatatttagacaaaacataatagttaccattttttttttcacagagttactacaacttaaatgatagcagtacaaattaagcaaacaataaataataataatataacgattcattttggatatacatagtctatgctacccgattttaatgaaaggtgctgtccgtatctgtgtaaacattaattaatctatctttttagtcaggtaaggcggatcatttacgatggagcagaagattcaaaaagatatttctcagactaaagataatcatatctcaatttgcacatcttgttatttgttcacggctaaatcaactcgttaggtacaaattcaaactaaatggtcaaaggtaatccatggactttcttcacatgcttcggtccatttgtgtacatatttttatttttataaagaaacattttaattaattaaaatatatattaaaaatcattattattaaatagaattctcagtaaaaaaaatagtcttttccataaatttataaaattagcattaaaaaatgcttattcttagagaaaaaaaatcttatcctaaacattttaaacattatcacaaatctttgataatgatttatttttcatacgaaataagtgttttttcgagattccttttaatattggtcccatggtggatttatattgttatgaactacttactactacacttggcgtcaaactttaccgataaaagaagaaacttttgaattgtttataaatagttaactatacaattatagacagggtaattcggtttggtttcaaagaatgatttgatttaatttggtttgaaagttttgctagtggtatatttactgttggttccccgcctcatgtatgtttagagttgaaagtcgaaacctcttgagattgcatcatttaagcgcttacagtacccctcggctcaaatgaatttgtcaggaaacttttttcctctaatacatatcaccataatctgatttgtagtaccacgatctggaacagatattctcctccccacgtttttatcaatagaatccaacactccttgtaaatttgaaatatgaaagttttaatacttgatgttattttggtatttctcatggtctaaaactcgatctcatgtaatttacaatctttggctttgtttgtttcatttctttgcctaaaatataattaattgacgggtttgatttcatgcactttctgtcacaaggaaaggtaacatttaaaagttttcaattttaaattttgactgcttgaagggaagctaggtaggaaggcaacatgatgatgaagacaatttcctctactggtttgtaagtttgccttgctagagttctgaacatggaagaaatgtttgttggatttactgcttaaattcgtgaaggaccacttgaaaagtaatgatatatatacacacacttgcaagaaaaatttcagataggtggggcgcggtcattgcatgaatctttgggtctaggttttgaaaatatcgaatgtgtctcatatcatttccttcataataccaaccagctagtcaaggccagctgcagtagtgtggtccatgaatatcacctgattttaatgcctagctagccctcttattaggttgtgtcttctttctcctttatatccatttcaggtgtgtggtgggggaagcactgatcagcttgtggacaacatcagcccctctaactattgtttctttttgccatttacacatatatgctgctccaaatcaagacccagcccttaattaccaagtaattaaaacagctggtaattattattatttcaaccgttaaagctagctagctttttgacctgtactagtagtatgtatatatacttttctctcagctttaaactagatagtaatcaataacccccaccactattttttaaaaaaaaaatgtaaaacagttaattgcttctgcatattaatttggagaacactttgttttacctagctaactagttaactatcttataaaggaatcactcattagagatggagctatagtgtttggattcaaagaaaacgcatctaaagccaacagagaatataatgatgaatgtgagacatacattaagaaaattcaagttcatatatttctccacttttttcatgaaaaggactatgtatatgtaatctatgagatatagcaactttcaaagaataaaacaacaagtggggggtcgagtctatctcagcttagattgcaaaaaaccctaatgatagatactgatagcaacccttccttgatgcaagtctaagtcccctgggtagaattttacccccagaaggaggcattgagctattgtggaccatacacgaactgttctcaaacatgccccccctctttaagcacaataaccacgcaaaatgtctacgtaccctatgccttgtcttgctttctttctggtataaatgtcatctttcattcttagggcaacctttaatgctcaaagatttgtactgtacatttgatggacatcctttgttggtaaagattttcttttgagatattaattaattatttttttcagtgtatttgactgatattgtttgaatatttttggaccctttgttgatagctctagctagggcaaaacaaaaaaaaactagatgcagaagtatcatatatctatgcaacatcatatttttgcaataaaattatataataactagcataaatgaaatagtcattttttttatatatctcttcatcatataattcactttatcacatgtttctttttatctcttatttgttgtatatatttattatattaatataaattctctatagattactaaataggaataattaatacaaaagcaacatgtttccgaatcacatatctttgcccttttctaattctgtcctatcatttcccaagtctcaaccaaaccagattaagttaagcccccccccccgccccccccctccacactcactctcacactctctttttttaaagtcacgagacccactgtccaattattcattcaatttttgtgtgggggggcggggggagataagagagagagagagagtggcagaggaactgatagagaactttcaaagctctttatcttctaccatcactcaaccagcctctatattgcagtctcaaactgaaagtctaaatttttttgtaaaaagctttagttttatccctacccccaccccatctgaaagaaagagtgtttgcctcacatcatttttcccctttctgtctctctctctgtcggtaccatgtaggtcttcccccactactacaccttcacacccttcttttcttcctcctctttctccttctctaaaccctttaactttctctctcttatgactttgttgttcctttacaggagaccagaacgaaaccccttagatcttaacaatttgcccgatgagtactctagagatggcaaacaagtcctcgaagaccatacctcttcatccggtaaacttcatgatcataccaatatatatatatatgcacgctgaaatatcaaaggaacactttttttttctttctatttaccgaattctatttcacaatcacacaccaccatgggaagcctttcacttttcacaggaaacaaagttgaacactgcccgtggtttgttacccatccctgtggtatattccttgaccatgaaacagtgttcaccacacttttttttcctcatttttttattctttttgttttgtccttgtatacgtttcttttctttttttgtttcttctccttttcctcttctacttcgttatagtatctcttaaaagttatggaaaaaataaaataagaaaaacataaaagtagttaggtgatagaatagaacttaaaaaaaagaaaagtagttgtttgggggcgagcggtaagttaattaattgaattgatttgatggaggatttgggtaatcgagaatggggagttaaaggcaaagaagggtgtcatggaagttgctttaattggatggttatagttgcaggttgcaggaaaaagaaaagcggcgggaaggatggaaaagacgagtgtgggaaggtctacgagtgtagattttgttccctcaagttctgcaagtctcaggctcttgggggacacatgaaccgccaccgccaaggctagtaccacctatattattatactttatattttcttcctcttttcttttaccactccttctcacaagaaccaaatctcttctggccgttaatgatttggccatgaaagcttgtcatttcaatcacaaaatgttgtgttgttggattgctgaaattcgatcatcgagagggccccttcagctgttttttttttttctttttgctttgctttattatttgtttttgtgattgttttgagcagagagggaaacggagacgctgaaccaggctcgtcaactggtctttcgttgtgatcataacattgctgcacaaggtgcccctcacttagggtatgcacccattacttccatgcagcgattctcttcctatttcttcttcttgttcaacatttatatatttcatttctcaaatacttgtttttctgtgggttctttagcgtttgttaacgttgttttttcaaggtataacacataatatttgggtactcagcatgacactgtttgatactgcgatttatttgtgataatattcaattcagatgctgccaaacaataggaacggggggttatcatccctcaggagacccaacagtgcctctaagattcccaagatacttctcaggttcatcctcaactcacatgccaccatccccgccaccgccgccgccaccgcaacgaccatacctatacccttcacctacgaggccagtgtcatttgggtcatcacacttccctctccagcatgcagtgaacgattactatgtgggccacgtgatgagtggtggcagccacggacactatgttggaggagagagcacaaggagttacacgtgcattggtgcaccggtggggcaaggtggcggattcgctggtggtaaggaggggtctgcagtgcaggaggaagggttgagtacttggggaaggggctattcaggtgcacaggatcgtttggatcctccctcagcgatcaatcggtttcaagatggtttctaaagagatgagagattctttgtttgagtggtttttggtttgtgttatgtttctgttatgttatgtggtatcatcataaagacacgcaatccagagagagagagaggtggtttttggtttatctacagtaaccagggacagcttttgagctcatggacacgctcagctactttggcttggagttgtgggtgggatttcttctcaacatcgccttttgtattggtagctagctagctagcttggacaaccagttagatttgaactgaaactttccaaactccttttcctttgcatgccaaattacaaccattttccttctcagtaatttgttctttcaatatccttctattatattacactagtaactagtaagtaatatctatctctgttactattttatatatacatccttctattttatatatgcctgtttttgtgtttaatttgctattccaaaatctctaaaaccccccgtcactctcgatcgctctcactctctctatccaaaccaaaattgggatcttctagtttcttgaaatgttttatggtctcactgtcacactatgctagcacaattagggtaatgacacagaatttttggagtcctcttgcgaaaaaaccatcttgctgaattaatgcttccggaataggatattcaaacaatcaaatttgccaaaatatctaatttcttcttaaagaaaagctttatcctccctccctatttctacgatattgtaaataattattttaaaatgttaaaatacagatcgagattatttttagcagcagacagtgaatgcagctatatttaatttgcttggtacataccgaacataactactatctaaggaataaaaacactcttgctgtcagctccaagagcttctaccaaatgcagcagcttagagaaatatatacacagccataactagctcatgatcgttcttgaaacagtaaaacacgtgtaaataatgaaataatgaaaccacattattagcatgatttttcttttcttttctcttgttttcaatacttttatttaccgactagttctctcctctctgttggaaatggatatatttttctttgtatataggttgtgcttcctttacgcacagtaagtgaggattttattataagtaaattatcctcataaaaaatattttaaaaaggtatattctggcttggcttctactattcctatatatttttggttcgtgttatatagtttagttcgtgttttcactcaaggagcattaattccttgactcaacaaaggcaaatctgctaaaccattaataagtgatgaaatttattttttctagggatggtaaaaatggtttgtatcgtatgaaaaggaaaggcgatgattagtgac

SEQ ID NO: 297 - DNA, 3042 bp, Glycine max
aagaatgatcgattgaatagcaatataaattttctcaatgcatatatagtatttacttttacttattataccatcccacttttttattttattttttctctgaaagtgttttgtttctttaaatgaaaaaagagaaatttttaaaatttaaaatcaactagtattttttctatttattatacatgagtaaaatttattttacttaattgaaattcatcataaatatattattttaatatataaatgatattgtaattaaaattaataataaataaataattttaatataaaaattataatttgaatttgcaaaaattaatttaaattttgatacaaaattattttaaattaccaacaattgttttaaaaattaaatttcaatttagtaaaagaaggtaaattgatctcaaacataaagataaaggtttttgtctgtcatggtatctctcaacttatcctgtaaaaaattaatcatgttgtgttacataaatgtctttggttcaagataagagaattttatatataaaaggagtcaaatacaaaattttcaaattaaataaattattttttatatataaacagaaagaaatcttacactatagaaaacaaaaacaaaaatcagttaaaaagcaatcaaaatttttcctgaagtataaaaaatattctacgttcacttctatattctaatttttcctgaagaatcaaaatagaaagaagatccttttcagattattttggcatcatatacacactagatggacatttttgcgttggcaccagctgccaggtgattttcaggtggctcgacacccacacaagacggcgctgtcacagagggagcagtggcatcaaatgtgttttgcaataattaaatcttccgcattattttctttaatcatttctttttaaaatggctgcatgagccatcattcaaatccttgaatcataccactataaatacgtgtattaccctatgatcttcaccacacaacattacttgttcaccaccttgctctccttgcaacttccacccctaccacctaccttgattctcttgagactttttttccaatggcgtcaaagtttatctttaccactgtggttttacttatgcttttgtgcttgcttctgatgagggagccttctggtttgtcaatgttctttttttcttgttattaccatagttatttgagtgacaaatattggaatataagattgtgtattgttttattcatatttttgttgctagagtatgtgttatagcattcttataatttttgttcactggttgcaggttgcggttctgcgtatgaatgctttggtgctaatgcagctgatctaagggacattccaaacaggaaggtctgactctctctctctctctatatatatatatatatatatatatgtgtgtgtgtgtatgtgtggggtttaaacttcaaaggggttaatttctctctctttttttcacgtgatttttgtatgatcgtaacgtgagaaagatcttttttggtacatagtttctggggtaaatttctataactttatcttgtggtgtatatatgcaggtgctgtctgttttgaaggataagaaaactagtgctctgaaggctagtctgcaaggatcatcaagcaacaagtatggtgaaaagccactgaattgggagttaaggaaggttccttctggtccagatccgctgcatcataatggtgtcaaccccaaaaagcctcaaaccccttaaactcaccgatggaaccttctttgtgctcttggcctagtattagttatcagtgtgaacatctaccagcttatggcataaatataaacatacactcatcttccttttcatctcttgttttacctattttcctctctcttttttcttcttagtatttccacccctttttcaggtgtatgtttatgggtgttgaagttaattagtgctttagtttttacttgtagtagaatagatggcatcatctagtttctgtgctaattttatgttaattaagcagtatttaatgcatgcagttttttaaggctggaatgaaatgtcgttatgcaaaggcaaatttaaattaagttaactaatttaaaaccagtgaaatatggaaaaggaaagaaaaggaagaagcaagtcttatttgacagattattttttttaagtaataatacttaaatattttattatttttctttatttttttattatatcgtaaattttattgtatttgtatatttttaatgttatatatcatgagtgatcatgtaacattctttttctatgtggtaaaagattatgtgcacagctcattcatggattggacgggaaaaacagtgacatgatgtgttctgctcctttcacccgaatactacaaaagtatgtatatgcagataactaacctagagcttctattcatatctgttatgttatctatgctattctgacgcgggtcagctagatatgacagcaatgtcactaaggtgacgcaagcgaatcatttccactttcaaaaagtatccaaatatccaacccaacataacaaattgaacaaaccaaataatgggagcaaaaccaaatctggtaaaatattctctgcccgtattaacaaaggtatatatacatacatatgtatatattcatgaaaatgaaagacaagtgaaaattataataatacacaataaacataatcttttaccacataaaaaaagaatgttacatgatcactcatgatatataacattaaaaatatacaaatacaataaaatttatgatcaataaaaaagtaaagaaaaataatatatatatatatatatatacaaattatattattcattcaatatatggataaatgaaaaaaatactattactcttactcatacaatatttgtttataagatcattttttttctatctccctttcataaagtcgaaaagagtcgctgttgtgcatatgatttgttaagatgatgatggctaaacctcaccaactcgtgcctttctacgctacacttctcgacgcctgttctttctcaatcta

SEQ ID NO: 298 - DNA, 4615 bp, Glycine max
atattattaatttggacaacattaattttacctagctaactagttaactatcttataaaggagtcactgatcactagagatggagctagtactgtttggattcaaagaaatgcatctaaagcgaacagagaatataatgatgaatgtgagacatacattaagaaaattcaaatccatatatgtctccagttcatgcacatccattgaaaaggactatgtatatgtaatctatgagatatagcaactttcaaagaataaaacaacaagtgggggtcgagtctatctcaacttagattgctaaaaaccctaatgatagatactgatagcaacccttccttgatgcaagtctaagtcccctgggtagaattttacacccagaaggaggcattgagctactgtggaccatacatgacctgttctcaaacatgccccccctctttaagcacaataaccacgcaaaatgtctacgtaccctactccttgtcttgctttctttctggtataaatgtcatctttcattcctagggcaaactttaatgctcaaagatttgtactgtacatttgatttccatcctttgttggtaaagattttcatttggaatattaattttttttttctcaatgcatttgactgatattatttgaatattttttgaccctttaatttgttgatagctctagctagggcaaaacaacaaaaaacaagaaaactagatgcagaagtatatcatataattatgcaagatcatatttattaataaaattatataataaccagtataatgctcatttttttctaccttcatcatataattcactttatcgcacatttctttttatctcttatttatatatttattaaattaatataatttctgtatatattaggaataattaatacaaaagcaacatgtttcagaatcacatatctttgcactttataattctgtctgtcatttcccaagtctcaaccaaaccagacgaagctagctagcaatttgcaaaaaaactgattaagttaagccccccacttccactaccacactcacgctctctttttaaagtcacgagacccactgtcccattgttcattcaatttttggtgtggggggagataagagagagagagagagagtggcagaggaaccgatagggaactttcaaagctctttatcttctaccatcactcaactagcctctatattgcagtctcaaactgaaagtctcacaaattttgtagaaaactgtagttttatccccacccccctcccccatctgaaagaaagagtatttgcctcgcatcatttttcttttctttctctctttctgtctctctctctgtcggtaccatgtaggtcttcccccactactacaccttcacacccttcttctcatcctcctctttctccttctctaactctaagcccttttaactttctctctatctttttctctctcttatgactttgtcgttcctttacaggagaccagaacgaaacccattagatcttaacaatttgcccgatgagtactctagggatggcaaacaagtcctcgaagaccatacctcttcacccggtaaacttcatgatcatatctatctatctatctatatatatatatagaagcacgctagaatatcaaaggaatactttttttctttatatattccgaattctatttcacaaacacacaccatgggaagcctttcacttttcacaggaaacaaagttgaacactgccgtggtttgttacttacctctgtggtatattccttgaccatgaaacagtgttcaccacacttctttttttattcttttggttttgtccttgtatacgtttccttctctcctttttctttttttcctcttcttctcttaaaagataaaagaaaaggaaaaaaaagaagaagcataaaagtagttaggtgatagaacttaaaataaagaaaagtaattgttggggcgagcgattagttaattaattaaaatgaattgaattgatttgagggatttgggtaatcgagaatgaggcgtgaaagggaaagaaggtggtgtcatggaagttgctgtaattggatggttatggttgcaggttgcaggaaaaagaaaagcggcgggaaggatggaaaagacgagtgtgggaaggtctacgagtgtagattttgttccctcaagttctgcaagtctcaggctcttgggggacacatgaaccgccaccgccaaggctagtatataccacctattatatcttttcgtttttcttcctctttactctcacaagaaccaaatcttcactgcccgttaatgatttggccatgaagggttgtcatttcaatcaaaaaaagttgagttagctgaaattcgatccagagggtcccttcagctgtttttctttttttctttttttaattctttctttctttttgctttgcttttattattttgttttgagcagagagggaaacggagacgctgaaccaggctcgtcaactggtatttcgtagcgatcatatcattgctccacaaggtgcccctcacttagggtatgcacccattacttccatgcagctattctcttccaatttgttgttgttgttccaccctaatattacactatcattcccagttctttcttaaatacttgtttttctctaggttctttagcatttgttaacgttgttttttcaagttaacgcataatattagggtgcgcagcatgacactgtttgatacaattgactgtgataatattcagatgctgccagccaataggaacggggggttatcacccatcaggagacccaacagtgcctctaagattcccgagatacttctcaggttcatcctcaactcacatgccaccaccgccgccgccgccgccgccaccgcaacaatcacacctatacgcatcaccttcgaggccagtgtcatttgggtcatcacacttcccccaccagcatgctgtgaacgattactatgtgggccacgtgatgagtggtgggagccacggacactatgttggaggagagagcacgagtagttacacgtacattggtgccccggtggggcaagctggtggattcgctggtggtggtaaggaggggtcagcagtgcaggaggaagggttgagttggggaaggagctattcaggaggagcacagcatcgtttggatcctccctcagcgatcaatcggtttcatgatggtttctaatgagatgagatgagatgagagattcttttgtttgagtgtttttggtttgcgttttgtgttatgttattttatgtggtatcatcataaagacacgcaatccagagagagagacataacaagctgacacatggggtcatggagaggagggtatagctaaggctaggatgaagagagagagtgtgcgtgagaggtggtttttggtttatctacagtaaccaggaacagcttttgagctcatggacacgctcagctactttggcttggagttatgggtgggatttcttctcaacatcgccttttgtattggtagctacctatcttggacaaccagttagatatgaactgaaactttccaaactccttttgctttgcatgccaaattacaaccattttccttctaatttgcttctttcaacatactactattactattttatttatatatatctatttatgtgtgcatgtctgtttttgtgtttaatttaccatttcaaattccctaaagccccccgtcactctcgatcgctctcactctttctatccaaaccaaaattgggatctactaatttcttgaaatgttttatggtctcagtgtcacactatgctagcacaattagggtaatgacgcagagaagttttggagtcctcttacgaaaaaactatctagctgaattaatgctccctgaataggatattcaaacaatcaaacctgcaaaatatctaatttcttcttaaagaaaagctttatcctccctcactagctatttccacgatattgtaaataattttagaatacagagattatttattgcagcagacagtgaatgcagctatatttaatttgtttggagcataccaaacaaaactactatctaaggaataaaaacactcttgctgtcagctccgagagcttctaccaaatgcagcagctaagagaaatatatacacagccttaagtagctcatgatcgttcttgaaacagtaaaacacgtgtaaataatgtaaccacattattattagcatgatattttctcttgttttcaatacttgttggaaatgaatatgtttttctttgtatataggttgtacgtactccctttacgcacagtaattgaggatataattataagaaaaattatcctcttaaaaattattttaaaagaaaaagtgtttttctggcttcttgtcctatatatatatatattagttcgtgctatatattttagttcgttttttcactcaaggagaattaaatattccttcactcaacaaaggataatatgttaaaccgtttataagtgaagtttatttttttctaggcatggtgaaaatggtttgtatgaaaaggaagggtgatggttagtgacttatatatggcagtgttgatagtgtttatggtac

SEQ ID NO: 299 - DNA, 2913 bp, Glycine max
tgtcgcggcctatattcaaaataatataattattgaataaatcaacaattttatctctaactagttgttacaaaattaaattatttaagtaattttttaagtattgatgaatatttattattttaattggtttatgtattttaacaaagttcatgagcaggcttagtttgaagagttttttaatatttgaaagattgttttacatgatttttaatattaagactatttgagtagttttattttacttttttttgacgaagtttcttttcattttacttaaaacactagttgaaagagaaagaaatactttaaatataaaattgatgatttattctaatggcttattttaaagatgaagttgatctcatgacgcttataactgggtagcaaacctgtgcagtattaggagtgctctcctattactttttaattcagcaatattattatttagtaaaagaagataaattaatctcaaacataaaagatacagttttttttcttccggaaaagggataatgaatgagtctcattctattatattaaagattaattttatttgtaaagtgaacccataaataattctctacatataaacataacaatttcttacaccatttcaaacataaagagatatacagttaaaaaagcaatcaaaattttctacgttcacttcaaaattctaattttttcctgaatcaaaatacaaagaagattctcttttcagattattttggcatcatcatatatacataagatggacatttgcgttggcaccagctgccaggtgattttcaggtggctcgacaaccacacaagacggcgctgtcacagagggagcagtggcatcaaatgtgttttgcaataataaaaatcttccgaatttttttctttaatcatttcatttaaaaatggctgcatgagccatcattcaaatccttgaatcaccccactataaatacgtgcataaccccatactcttcttcacaacacagcacttgttcaccacctggctatccttgcaacttccacccctacctagtttgattctctaagacctttttccaatggcatcaaagtttatctttaccacggtggttttagttatgcttttgtgcttgcttcttatgagggacccttctggtttgtcaatgttcttttttcttgctattaattaccatagtgatttgagtgacaaatattggaataagagtgtgttatagcattcttataattgttgttcacttgcaggttgtggttctgcatatgaatgctttggtgctaatgcagctggtcttacggacattccaaacaggaaggtctgtcactctatatatatgtgattcaaacttcaaaggggttttctcttttttattttctcatcacgtgatttttgtatgatcataacgtgagaaagatctttctttggtgcatagtttctggggtacatttctataactttatcttctggtgtatgcaggtgctgcctgttttgaaggataagaaaactagtgctctgaaggctagtctgcgaggatcatcaagcaacaagtatggtgaaaagccactgaattgggagttaaggaaggttccttcaggtccagatccgctgcatcataacggtgtgaaccccaaaaatcctcaaaccccttaagctcacctatggaacctgctttttgctcttggcctagtgttagttatcagtgtgtgaacatctacaagcttttggcataagtttattgaaaaatataaacatgcactcatcttccttctcatctcttgttttacctattttcctcttcttctttttctttgtatttccacccctttttcaggtgtatgtttattatgagtgttgaacttaattagtgctttagtcatgaattgtagtagaatagatgtcatcatctagttaattcctgtactcattttatgttaattaagcagtatttaacgcatgcacttttttaaggctggaatcaatgtcgttatgcaaatgcaaatttaaatttaagttaactaaaaccagtgaaatatggtaaaggagagaaaaggaagaagcaagtgctatttgacaattgtgatggcattttttatgtgctaaaatattatccgcacagctcattcattgattggacaggaaacaacagtgacatgatctgttctgctcctttcacccgaatactacaaaaatatgcatctgcagatatccttctctgcaataactaacctagagcttctattcatatacttatatctgttatctatgcccctgctgacgcgggccagccagatatgacagcaatgtcacgaaggtgacgctagcgaatcattttcactttcaaaaaagtacccaaatatccaacgcaatataacaaattgaacaaacccaatgatgggagcaaaaagtaccccgaaacccgtaaccaaatctggtaaaatattctctgcccatattaataaaaaatactattactcatacaatatttgtttacaggatcatttttttttatatctctctttcataaagtcgaaaagagtcactgttgtgcatatgatgatggctaagcctcacaaactcgtgcctttctacgctacacttctcgacgcttgttcttcctcgaagcacttgaaaaatctaaaacgaatccacgcgctaaccattaccttaggcatttcacgcaatgacttcattcgaagcaagcttgtgtcttcctacgcttgctgtgcccaattgcacgaagccaatatcctcttttctttcaccattcgccaacccactttcctctttaactctctcatcagagcttattcctctctcaacttgttctcccaatccctctgcatctttcgccaaatgttgcttgctcggaaaccctttgatcgtcacaccttacccgtggtgctcaaatcttg

SEQ ID NO: 300 - DNA, 7322 bp, Glycine max
cttgagcatcaagcactaaaataattaaacttctccattaccaaaaaaaaaagataggtgattcagtaacatgtagtactagtactactgattttttttttcttttgattttaatgaatggttcgtatcgagcatcgagaaatccatttattaggtgtgtaatgtaatagtagtatttccttgattttcagtaataagatggattcttacatttatatctgtttgacagaaaatgttgtcaatgcatttcttgggcacaaagttttttgaaacatgaattaattttttcaaaatatttatgacatcaaattgaccctaaaataagtgataaagctttaacgtggaatgacattaatttttccatgataaataaaacacttaaaacattttaatattaatattataatcagttacaactatgttcaattaatgcaataacttttaaataaatattaaaatattttttttctgttctccaataaagagatcttgttgcacggaaaaagtcacattcttatttagtaaaaaattataattattgtttgaaaaatatcattttcactgcagaaaatttgatccagctctacagatcatacttttattgtacaataatacaataaaaatattcatctgcaggaaatatcattttcattgtacaataatataaagataaatatataccagaaaagaaaaagaaactgatgtggcacaatgtattcactgaaagaatgcatattgtatttcacctttcaagcagcactaagaatatacttcttttattatacttgtgcatttactcaaccaccctcggtggagtaagaaagaagatagataaaagttttttttgacatttggtgaatctcttaattaaaaaaataaaataatccatttcctttatttaatttcttttttcccatctgtgaaattccaattctgcttcgcgctcctgtctataaattgacttagccaccacctcagtttccattcattcacttcttctctttataccccccctctcttttttgcgttcattctgttttcgtaagtactgttgtttttctcttctatttctttttttgtttgtgttgtttttttttcttccttatcgttgttctgcctctcctctgtttcggtgctctgttcaccacttccacgtgagaatgatcttccttctttgcatgttcattctctcgtgaccactggatcagactccatgttctgatccagggtctctctctaacgcctgtactttcatccatgaccaccttaaaaacaacatgggggtggtgctgttacactaactctgtttctggggtgctgtctttgttcaattttactcagaaaatatcttttcttggattctattcggtgtgtgggaacatgatcctgtcggtcggttgtttttaggttaatccttaactggttacaaggatctaacgcttgaatgcatgtcctgagttaaagaaacaaaagaagaacacacctagtacagcctggcctcgaaccaagaacttctttgttggtttctcattattactaaaataaaataaagtatacgttttcttttttctttgggatgaacggttcagacttatgagaagtttaagctaatcctgtagtggagtgttcaatttattttaaactttaaagcaatagctcaagcactaaacttctttttcaagttcaaccactttggtagcttgctaattgctgctattgttctaattaattaatgtaattattgtttaaaaaagaaaagttggtgacactggaataaaaaagtgtactatctggcaattattcttctgcagcaatgtttgaggttgaaatcttagtagaacaaagtagaagatctggtatttatattttttgtagacagatggtgggggtgggtggtaggccttgaaatccaatatagttttgtagaataattttattattttttttttttgctcacttgtttgtggtattgattttgtgatgactcaagattaatgatttaccttcatttttttcatggtgacatattatgtatattcttgatctgtttcttacacttctttttcgttgttgtagctgttgaagtctttccctagccaatggccaccgatcgtttgacccgggttcacagtctccgtgagaggcttgatgaaaccctcactgccaacaggaatgaaattttggcccttctgtcaaggtaactcatcattcttgtttttggtttagaagatttttttaaaagtcaaagtgttttctctctttaatggtagtgaagttctactaactatgtttagacagtgagtttgtttaaggaaactcaatttgtgtttgtgtgtgttctgtctttaaaggtggtgaaagttctactatgtatgtgttgtggaagcagtagtgtaacactaagaatgttatgaaattttgataggatcgaagccaagggcaagggcatcctgcaacaccaccaggtcattgctgagtttgaggaaatccctgaggagaacagacagaagctcactgatggtgcctttggagaagtcttgagatctacacaggtaactaacatttgagctttaaaaataggagaggttttagctatgatccttggtgttttttttgttttgttgattttcttatttctatgttgtaggaagccatagttttgccaccatgggttgctctggctgttcgtccaagacctggtgtgtgggagtacctgagagtgaatgtgcacgctcttgttgttgaggagttgcaacctgctgagtacctgcacttcaaggaagaacttgttgacggaaggtgaagaaaaaaaggctttgaatttgtgttaaagcggtgtacttgttttgttatgttacttgcacaaattataaacatttctctcactttcattgcagttctaatggcaactttgtgcttgagttggactttgaaccattcaatgcagccttcccccgcccaactcttaacaagtcaattggaaatggtgtgcaattcctcaaccgtcacctttctgccaaactcttccacgacaaggagagcttgcacccacttttggagttcctcaggcttcacagcgtcaagggaaaggtaggtgtctatttctactctttaaactagagtaaagcaaggtagtgaggagtttatgcatgtgtaagacacattcttcagtagttcaatggcttgaatatctacatccatgtttggaccatgtctagtaaccagatctagagtacaaatctaatgtgtgtagcatatagtatctctagcatgttgaacttaaggcatgaagttagttttaataggttaattttgttgtgtattttactgatgaagatttttattttttggaatatgcagactttgatgttgaatgacagaattcaaaacccagatgcactccaacatgttctgaggaaagctgaggagtatctgggcacagtgcctcctgaaactccctactcagaatttgagcacaagttccaggagattggtttggagagagggtggggtgacaacgcggagcgtgtccttgagtcaattcaacttctcttggatcttcttgaggcccctgacccgtgcacccttgagactttccttggaagaatccctatggtgttcaatgttgttattctttctccccatggttactttgcccaagataatgtcttgggataccctgacactggtggccaggttgtttacatcttggatcaagttcgtgctttggagaatgagatgctccatcgcattaagcaacaaggattggacattgttcctcgtattctcattgtatgtcctagtacatagttgtgaagtgtttcagcaagctaaattaagcttacttgtgtatagtgtgtgtaatgtggatatgttattctaattggtgcttgtgaatgttgttaaaatgcagatcacccgtcttctccccgatgcagtaggaactacttgtggccaacgtcttgagaaggtgttcggaactgagcactcccacattcttcgagttccctttagaactgagaagggaattgttcgcaagtggatctcaagattcgaagtctggccctacttggaaacttacactgaggtaaatttttgaccccatcataatattgacaccgtttaagaatttttgatgtgttttaacttatccaatccaaattgtgtcttgttaacaggatgttgcccacgagcttgccaaagagttgcaaggcaagccagatctgattgttggaaactacagtgatggaaacattgtcgcttctttgttggcacataaattaggtgtcactcaggttggtctacataacatgtctagttaaagttgttaggaccttatactttggaattcaggggcctaagttttttctctttgtcaactgtagtgtaccattgctcacgcacttgagaagaccaaataccccgaatccgacatttactggaaaaaattggaagagagataccacttctcttgccaattcacagctgatctatttgccatgaaccacacagatttcattatcaccagtaccttccaggagattgctggaaggtgagctaacccttttacatttttgttcttttgcctattttttcatttattttattgattagcttactaaaattcttgtatcattgttcaaatacttttacagcaaggacactgttggacagtacgaatctcacacagccttcacccttcctggactctaccgcgttgtgcatggtattgatgtctttgatccaaaattcaacattgtctcccctggagctgatcaaaccatttacttcccccacactgaaaccagccgtaggttgacatccttccaccctgaaatcgaagaactcctttacagctcagtggagaatgaagaacacatgttagtttctcctctcatttccttgatgttatctaatcatagtatcatgaatggtcacaatttcatcaaaatgtttgatattgtgagaaattgcagacagacacagctgggttagaccacaaagaaccgtttttttttttttttaaaaaaagaagaaaaccttggatatcatcatgcatagaagaacatttgtctaatgcaaattcatgtatgacagatgtgtgctgaaggaccgcagcaagccaattatcttcaccatggcaaggttggatcgagtgaagaacatcacaggacttgtggagtggtacggtaagaacgcgaagctgagggagctggtgaaccttgtggttgttgctggagacaggaggaaggagtcaaaggacttggaagaaaaggccgagatgaagaagatgtacggcctgatcgagacctacaagttgaacggccaattcagatggatttcatcgcagatgaaccgtgtgaggaatggagagctctaccgcgtgatctgcgacaccaggggtgctttcgtgcagcctgctgtatacgaggcttttggtttgacagtggttgaggccatgacttgcggcttgccaacattcgccacatgcaatggtggtcctgctgagatcattgtgcacggcaagtctggcttccacattgacccttaccatggtgaccgtgctgctgatctccttgttgacttctttgagaagtgcaagcttgacccaactcactgggacaagatctcaaaggctggtctccagcgtattgaagagaagtaagcatattaattctgaatcaatgtgtttctgttctgtctgttgtggtaattaatcattttctttcttcttccacaggtacacatggcaaatttactctcagaggcttctcactctcaccggtgtctatggcttctggaagcatgtgtctaaccttgaccgccgtgagagccgccgctatctcgagatgttctatgctctcaagtaccgcaaattggtatgtatagtatagtactccctctgctcatttttattcagtgaattttacactataatttttttcttattaaaagggctattttctcttcatatttttaccttgaaatatgttgtcattgaacttgctaatgtatcttgttattgtttttacctttaggctgagtctgtgccccttgctgctgagtaaactgaggataaagagttggataaagaaatggaggaaccggctttttctttctcatttggagtttgtcgcacttgagttttataaataatgtccgtgattttagttttgtgattaagctttcgataagaggagagaaagagaaggaaaaaaaaagttgcttttttttttgttgttgcatgatttggatcttgattggaaaagcttcgaattggggtagttttacccatcaattcaattttaagccgtgccttcttcactttgccgtgtctaatagtatcccttcccaacttaaacttttatatactgtagttctttttatctttaaacttaaaacaaagccatgaaaaagcatcatcatcatcataataactagagactagagtattgtaggacaaaggggcccccgcaatttcatccgttattgtctatatcaatatggtggaagaaagtgaaaattgacgttggaatttaaagatttaattgtcgttgtcaaatctcattgttccattcccgagtagcaattggcaaagcaactcctcttcaacagaatatttcgcgtctggtatggtatctagcaatttcaatgaataaaatcctacgagagttaaagtgagttgttgggaatggacttgtacgttaaattttgtatcctctcccatttttggccaccctcatccaacggctcttggttgatcccactttcactttagtcaaataacgctgccatgaaattactaacctttttgtttgcttccttctaatcagacacatacagtgggagaagcattttcttgtgaactgtttatgatatcgaaaatgacacatcaatatctttttttttttttattaacaaaagaacgttactaattaactaagagtacaagtagtatcaattccaaaataaaagagtccaagtagtactcaaagataccacgttcagttacaatatatgagaacaaatatgtagaagaattcttgttctaaatataaatttatcaacccttgcccttacccataacataaacactttattatgttagcatcagttcacctggctagacccgaaaatagtaaaaaaaaaatgaaaatggtatatcaataaattgcgattttgtataaatcttaattttttaaaaaagtaaaaaacatagtaacaatataacatttcaaggtatgaaatatctatataggatctgatatgcttccgaatcttggcttgtttgaatcccttggctagcagcacacttacccgta

SEQ ID NO: 301 - DNA, 2896 bp, Glycine max; identical to SEQ ID NO: 236

SEQ ID NO: 302 - DNA, 6532 bp, Glycine max
gtgttaatttcttttggtttctctttccttccctcttcattttcgtttcctccttactcaaagccattaggagaggagagagagaggaagagtaaaaaaacaatttgttttagaacggtgtaaatctttaggattcttgtggaagaattcatctttcacgccaaagatcttgaatctatctttagtggttgatctagctaagacgatcttgagtttaagaacctagctcaagacccatcaaagcatctttattggtatatctcattttgagatcttgagcaacttttttgtagtcccatagttccacataagatccatgaattctcccatttttttagagttagatttcattttgagatcttaaaccatttattgtaggtctcacaatagattccacctcttaaaattttctcccatgaacccaataccccctccatttttccttcttttctcttccctctccccatccaggaacctaatcctcacaagttcctttgtttttgccaccctcctttgccctcacctcctccattgctacctcctttatctctagtagtagatcttgcaaagactaaattttgagctcaagaatccacttcaatatccaataagaaatatgctcttttttttttgtggatcttgttagaacattagttaagaaattaaaagtaaaaatatttattgtgcaaattataagagaacgcaaaagaagatcatagataatataattttttgttacccaataaaaatattttcacttaaaaaaaacttaaaaactatgctccaagtacatacatacgtaacacgtgtggacgtgtacatttggagtcgcttaagatttaagaaaagcaccgccgtaccttgacgcgtataaaaaatatcgagatgttgctacgacgtggcgtccaaactaaggcacacggataatgaaaataaatacagcgcgtgagcagaagttacttactcactttacactgcatcaaccaaacaaacaaataaagcaaaaggcctttttattccaaagcaaggaaggaagaaataaaccgaatgagagcattaacctcttcttcttccactttcattccaaagcgttattccttcttcttcttcctctccattctcttcgctcttcgatcctcgtccgggggctgctccgaataccaccaccaccacgcgccgatggccacgataggaggcttacgcgactcccaaggctctcagaacagcgtccaaaccgaggccctcgctcgattcgccgtcgatgaacacaacaagaagcaggttgctgctaaatcgccctttttaaaaatatttttttccacaaaataataatataaagaattgtttttatttttaatcttgttattcgttgtcacttgtttacgtgttttgaatgcacaagaccaggttgctattatgttagtgtttgattcgaattccagagtacaagacaagtttaacagaagaagttgatcattcgtgaactgtgatgttatggccatacagaaacagaaatatatattttaaaagcttaatacatcctggattatttgggaatttttaaagtaaactataaaaaattgtatcatttacagtttttgtaactgggtctttctggaatttgtaaaaccgccaaaattctaactccaggacccaattacaaaaattgtcgaagatcaaggaccgaattacaattttttagtctagtgaccttttatatatatatatatatatatatatatatagaatttggtgaattcttatgaattacaatttgagtgtaaaaaattgtaagtgtcattgaattatagattctcatgaatggtaagattattcacttttatgaaacaaattcgagtttaatgcaattttaccataaaagtaccttaagatagttgttatcaaagttagcaaactttatcatacccggttgtttggatgacaatataaaaaacttttacaatgtcactacatagtaagtatatatattatttcctcaagttattttaggtgtcatatctagaatgatttcgaattagttgagtaaaaatctttttcggttcactgatcaatagtacaacaactgcagtctgcaatagctttatcctattaggtgaggtcagttaaacgaaattctcaggaatatcattctcgatatgctaaattatatgaattcatctgtttatatatagtgagggttatatgctcccactaatgtactgacatgttatttggattgctgaactttcttgtgattgtgattgcagtagttcttttttctttatcctgtcttatgttctatatgatgaacaatgttttatgtgattgtgaacttaacgtgttgacttgtgttggatggtgttgaagaattcacttctggagttttctagggtggtgaggacacaggaacaggttgttgcgggaaccctgcatcaccttactctcgaagctattgaggcaggtgagaagaagctctatgaagccaaggtgtgggtgaaaccatggttgaatttcaaagaactccaagagttcaagcctgctggtgatgtaccatcatttacctctgctgatcttggtgtcaaaaagggtatggcattttctaaatcaatcatctgtggtctttatatgactaagaaacattctaattggggtatttatttatttttatatcctccaatgtactaacagagcaactgtcattctctggtttctgttttatttttaattgggacatatgaagtgtatgttttcttattacaacactcacaagttgcatacaacaagcaagatccatcaatatcataattatattggtaatttgtgacgaggaataaattttcagtgcatgttagtgatcagaaggctctcaaaaggccaaatgttgttcatcattatagatgctgcttttgagtgaacacagttagtgctcttgggtttggttatgtagagcgagttgaggaccaatcaatggaagttggatgttatcattgaatcattgaattgaatctaaatgtgttgaagaagtcagagttgagaaagatgtaaaattaaatggtctaatgccttgtgggaatatatattttcatatttagtgcaacatcaggatgtgaatatgttgagttttctttacattggaattttcatgggctgctatttgttacaccagcaatttccattaacaatagtcgtaaactcataattgatgtataaagttctgtaccatttgcctttgcatatttttcttgtgtatctattatagaacatttgaccccaaagtgcttattaacacatgatctactgttctgtttttgttatcagatggtcaccaacctggatggcaatctgtgccaacacatgaccctcaagttcaggatgcagcaaatcatgcgatcaagactatccagcaaaggtctaattcactagtaccctatgagcttcatgaggttgctgatgcaaaggctgaggtcagtgccttattctatattctttgaaatttttttgattgagtttgtttgctcaactagatgtcacatggttgaattgttggctgtaatttgatgtttaaatttgtagagctaggaaaattccatatgggagaatttgtgaattttctggtttgtctggtctgatttttggtgtattcatctggagcaggatcttagtgttcattttctttggcctggttatcttacctgcatgcttgtttagttgcttaccagaaaccttatgtaaaatatttattgtataatgtgtctagcgttatgctattagcttcctgtaatgtacattggaagttgcttttgtcttataaatttctgagacccgcagatcgttgatttgtagttagttagtcatgcgtgctttagtggtatttatgctaatattttgaaatgattattattgaatttatttaattgtttcaaatctaaaacaaccctggcattcccactaggtgggattggataaatgcaagatagatcatttacctcttaatccctcttagtggtttaaccttataattttctttgctctccctttacctttaactattgtacttttttccatctagtcgactcccttactggtgcttctatgagttttctctgcgcatgcccaaacaatctaagacaagactacctaccattctttcatattgttcattttttacacaacaatagctagctacatgcctacatcccactaggatgctgctcatttgttacacagacaaatttaagagtaatttatgcattcttttattgaatagaggagaactgtacaagtgtctacaaacatttgcatatataataaacacttctaatcagtaaaacttatgtatttagtgttgtatctactgctcgttgaatgaaattattgacaggataggtcaaacaaaatggcagattagagttttatattgtttcatctattgcggattgaatgaaaccatagatagaaaaggtaaaattaaatgacagtttagcacaaaagttgtctaaaataaaattaaggattaaagtttaaggttaaagacaagttgtgctcaagatatgcttcttggtcctttatcaaatcccttacattattttatatgcgaatttcacttctgtgaaatctgcttctggctacactaaataacctaactctatattagtcgagttaaacatgagattttgcctaataatattgtattgaaaagagtgagttgttagcatttctttattctaatattcatcaggtctcttcccttctcaagtcctcattaatatggtatggaagaactgttactatacatgtgtttgctgcttgcaacataaacatgtattcgccgttatcttattgctcccaaagatatgtaaattaatttagtaattaaaacatttgataagaaaagctgcatttggggatagcttacaggcttcttttgtgactgttggagagcatcccgggggtagagttactggtggtgtatcatggctgatggatgtgtaaatttctatgcaggtcattgatgactttgccaagtttaatctgcttctcaaagtcaagaggggacagaaggaagagaagttcaaggtagaggtacataagaataaccaaggtgggttccatctaaatcagatggaacaagatcattcctaattctgatcggaagtttggccacgctagcagtataggcctgggtggcacctaaaatatacctttttttttcagtggggtgtatgaatcttattatctatgctatacataattatatactaatcgggtattgttcttatctctgtctcagcaagtatgttagtgcttacccctttctctaagccttggcagataagttttcctatgtgtattggctttattaactgggaagctaccaagttacattagtacctttgtaacgtaaatatttacttaacataaaaatgtggatgttgaccatttgcatttaacgtatgcctaaagaatgtgaattattttttacctttaaaattaaattttaacatttaatgtgaataattctttttggctgagtttcgaacccaaaagacctatgtatgtaacattgttaactacagttaacgttttttttttacttaaaaaattagcaagtaaatgaagtgagatggaaactaacgctaaaagaatattggccctaatgctttacaaatagccgcaggcattaaaataacgaaagatattatcaaagacatgaacttggtttatatctccatgtgaacagttttgggagatggagatggtagatgagagtctgttgcaacaagactctcttttggcaaaatgcatgatagattgagataagtatggtatatatttttttattggtttacatggagtatgatgatacaagagctgtattgcatttgacgctatcataattcctgtatttgttatgcctgtatcatatagaggagtattttccacagtattgaggtaaatttagctagttcggaccctcgcaagtataaatgttttgctcatccttctcttatttggttgcaaagaaaacgaagtaaattgccaagcataattgcataacgaggggttcacaagttctttgcaacaaaagtgccgtttaaacagggctaatgttgatccatatgctttaatcacgaaactgaaatgacaaacaatgtttcaaaacttcccttaaaattagcatactatcacagaaagatcgagctatagttgacaaaactgataacacgctcctaaagtgaactcaatctaactaaacaattgcctgggacttgttaaggatcactccctcatatttcacctggaaccacttcatagcatcctcctttgtgacacggtgctgaattccaacacgggacttgcacctacggcggcgtccgacacgatagccaggacgctccagtacaacaaagaaatccattccataaataccagttgaaggatcatacctgaagcagaatcaataatcatggaccaatgtgtaaattgaaatcttcatactcaaagaaattgaaatcataatcaaacaaatatg

SEQ ID NO: 303 - DNA, 4588 bp, Glycine max
tgatactatttcaataattgattataatcaaaattaatttttgtttaaataaatttattgaaaagtaattttaagataattaattttgtgtagatacaatatagtaatcagcttttacacgctaaattataaaaaaaggaaatgcaagaagttgaaagagaacaaaattgttgggaaatttaagagtgattcagggataacgtattaacatgcatgagaagaagaaaaaagttgttaaaaaataatcataagaaacaaatatctaagtgcataaaatttacttgagataattgcaaaaataaattatttcaataatccattatataaaaataatttatgtctgaataaattttgtgaaaaattgttttaagattacaaatttccgcggataatttttttttttacaaatttccgctgctgattacgtgcatcgtaaagaaaggaaagcgttgataagcaacaaagtagaaagtgattctagaataccattcttgagagtcacaggcaaaaccgtggggcgcacaccgaagtagacctgcagagtccaaaccggtgggcccgaacccaaggtgttgggctgcggattcgaaagcgaaaggacgctctaatactatttcttactattacatatattatttacggtaaataaataccaatcttaggtattggcaatagaaagaaagaaaaaatattactaaaatgtagtagttttttaataataagaaaaattaataatttttttattagtatcctttaggtatttttactgtaaataggaagaatggttatttatatttaaaaaaggaatatcccactggaaatgtaatattcgcttctggaaggtaagtctgggaatgaatgaccggtgtgggactcgtggcgacttttagattcaaacaaaaataaaaatcgcacgcatactacagtaataggaaaggaaagaggaaggttgtggtaaataaataacctaacctaacccttgcgacttgcgacttgcgagtgagactgaggttgggtttggaaggcaagggcttgtgttgtcacaatccaaggtttgtttgtgtttgtgccactgtcctgtctttgtttatatatcttagtttcgtcggtgtttacttagatgtatgtgttgttgtagagagaagtaatggcgaacatagacatcgaagggatcttgaagcagcagcagccttatgatgggcgcgttccgaagacgaagatagtgtgtactttgggccctgcttctcgatccgtagaaatgaccgagaagcttctgagggcagggatgaacgttgctcgtttcaatttctctcatggcacccacgactatcaccaggaaaccctcaacaatctcaagactgccatgcacaacactggcatactctgtgccgtcatgcttgacactaaggtaggttcttctattcatgtagccaatgattttgatgataataagcatggtattggtctacatttcttgtctttttctgatctgttgtttccatataactattagcttcaaagtgaatgttgtatctcgttggtgttaatctctcttgaccttttagttttacatttaatcctactggattgtgcagtagttggacagcttgctgcttttcttttttcttcgtaaatatcttgttgaggaggatggctcgtcctgtttctcttgtatggttgtcaatttcttattccattaacgtttctgtctacatctgctttgtgcagggacctgagattcggactggttttctgaaagatggaaaacctattcaacttaaagaagggcaagaagtcaccataactactgattatgacattaagggggatccggagatgatatccatgagttacaagaagctgcctgtccacttgaagcctggaaataccatactgtgctctgacgggacgattactctcactgtcttgtcttgtgaccctgatgctggtactgttagatgtcgttgtgaaaacactgcaacgttgggtgagagaaaaaatgttaaccttcctggtgttgtggtggatctacccacacttactgagaaggataaggaagacattcttggatggggtgtacccaacaagattgacatgattgctctttcatttgttcgtaaaggctcggatcttgttaatgtccgcaaggttctggggccacatgcaaagaatattcagttgatgtcaaaggtattttttgttgaacattcttattcaacttccataataactacaggttttttctattacttgtgatctatttttcatctgtggtttctcagttgctttggcaatggctgtttttttttcatcatacatgagttgcacattgataatggaatttatattggttaagtgctccataactcaagactaataagtggaaaacccatgcttttaacctccacagtatccatcacacagggataaaggaagagaatttatgtccttgtgtagcagactagcttgatatcttttatattctttataacacaagttgcatgctagtttgtttggtttttttccatatgctgaagataccagttcttctctgattttatgctatgctatttaaaggttgagaatcaggagggagtcctgaattttgacgaaatcctgcgggagactgatgcattcatggtggcacgtggtgatcttggaatggagatcccagtagaaaagattttcctggcacagaagatgatgatatacaagtgtaatcttgttgggaagccagtggtgactgctacccaaatgcttgaatcaatgataaagtctcccaggccaacccgagctgaagcaactgatgtagctaatgcagttcttgatggaacagattgtgtgatgcttagtggtgaaagtgctgctggggcatacccagaacttgctgtgaaaatcatggctcgcatttgcattgaagcagaatcatcccttgactatggtgccatcttcaaagagatgataaggtctaccccattgcctatgagtccattggagagccttgcatcatctgctgtccgcacagcaaacaaggccaaagcaaaactcattgttgtgctgacacgtggcgggtctacagccaagttagttgccaagtataggccagcggttccaatattgtcggtggtggttccagtgttgagcacggactcatttgattggacctgcagtgatgagacgccagcaaggcacagcctgatatacaggggcttgattcctatactgggcgagggatctgcaaaggctaccgatgcagaatccacagaggtcattctcgaagctgctcttaagtccgcaacagaaagggccctttgtaagcctggtgatgcagttgttgccctgcatcgtattggagctgcctctgtcataaagatctgcatagtcaaataatgcatgctcaactcaacgtgccgccaactaatgcagggttatgttttgccttttatttctttctttctgctgtttatccgtatcataaaatggaggatttagttactagctgtagatcgagtgttttttggtatactctgtttatattgcggagtacttctaaatcagattatcatggaaataatactcttaccttttaaaatgtgattggttttgcggataaccctgtttcacgcctgctgccaccagtttcctacttcttccttgtatttgatgatacattaacaagctgtaaaatataaatgctcattatccattagggttcataaggtatttttcaagtttaaattctttggagttgttagaaataaaaaaatatattgttctatgacacactgccataataccattagaacttactggaataattgataattgtggaaccagtttttatataaaaattaagtttttaagattaaaaaattattttgttttgagaataaaaaaaagatgagactcattgtaaagtttttagaagttgaattattagagtaatagatcggcgtaaatccacccaccgttggttctatagtatttgcgaatgtgcaatttttcttattcctatacaaatttacttgcatatttggtcttagcgtttttaaaattgagtatttttttttacaacaaagtcaaataatttcaatcataatcaactgagcaatacattgggaaactttataaaaaaaaacttggcgactagtaaaatgtgggttgcctttgccaaaacatgagcaattccattgccttgcctcctcacaaaactaacaaaaacaataaagatcggcttaaatccaccgttggttctatagtattgcgaatgtgcaattttatggttcctatacaaatttaattgcacatctgctcttcaaaatttttaaaactgagcaatctttttttactataacaaagtcgaggaatttcaatcataatcaactgagcaaatacattgtgaaacttgctaaaaaaaaaaaaaaatacttggtgactagtaaaaaggtggggttgcctttgccaaagcatgagcgaccccattgccttgcctcctcacaaaactaacaataaagcttggatttaaacaaagtaacctcttacgctcagacactataactcccaatttagaataatctatacaacaatt

SEQ ID NO: 304 - DNA, 5744 bp, Glycine max
gagagacacctccacgaaggaggcatgactcctaaccccacaaggcgcaggacctggggacgtgagaccaccttaggatcacgacgatgacaacagtgacacaacgacgcaatgtggtctcgtcgaaattggtcaaaagaaagaaaaaaacatagccagaaggagaaagatgatgatgaaaacatttgaataaattaacaatgaaaagaaaaaaaaatgagtaaaaagagaacaataacaatccatatgcccttcgtcgacgctcaaggtggttctcgtcgatgtccaaggtatgacatttagagaggaaggtttagagaaggaggcgcataggcaaaaagaaaaaaagtgtaggataatgaaaaagtcaaaaaatatggatgatattgtatgtttacttttgttagacaccgaacaaaaaattatacgaaatttagtgaattacaagtttttggatatttgtccagtccatggtccattattttattttttaaatcaaacattagacaaatgtttgtatactatccaaccccttattttttaacaaataaaacacaccctaaaagagttttttaattaggaatgaaagaatatgttaaccaaatgagaaatataaaggtgtaattacacttttagaaactcatcgatattgtacaattttagtcctcatgtttcaactgcgacaattaattcccccaaatatcggaattgtgtaattttagtcccctaagtttcaactcatttgtgatacttataggacacaattaaaacataaatgactaaaatcatccaattaaaaacccaaaaattaaacaatgataaagagtgcaattaagctagtgaggggtaatagggtaaattaagagaaaagagaggagggtttttgctagggaaaagacagatgtatccccaaatcccgaattgatgcgcataaaccattcattaagtggttgtcccttcttcccctctctcacttgctcctcctcctccttcttcttctgccttacatcacatacttcactctcttgtttttccctttcctctcctcaaaatttcttctgattcatttaatctttactcatcaatggctctgagactgaaccctatccccacccaaaccttctccctcccccaaatggccagtctcagatctcccaggttccgcatggcctccaccctccgctccggttccaagttagtcccactctcagatccccccctaattaacactttttcttctttctttaaacaaaaatcacgcattcacaacttttcaattcgattctcaactccacttaccactttgatctacccttttgcgatattattattattattattatttctttttttctttttgtagcttttttctcataaaagtgtctttcatgtgtggttgagtgtctaatgcctgaaatgaaagctgggaacagtgcaaacgacgcgctagttctcgcgtgtattttgaaattgacgtttttcttcaagattcagtattttttgtctgttgagaaatgctaacctcggaagatatattcaattattgtttggattatttggtaatctgatggttggggtggttcgatttcactcaatacacacaacaccattggttttatcgctttttttttttttactttactttaccttttgggtttgcatgtatttttcttcgggttggtgagaattgaaaatggattgttatttggttgagacttgagaaatctgtttcatcgtgcttcaataccgacaactttttatttcacttgctctcagttttttgtctatgtttgtttgcaccgtgaaagaaacgtgtggttaattgaattgggtttcgtgatatcaattctgctgttaactgttgcagattttttgaattaaagaaataaatattgcatgtctgtgtcattcttatactgttcaatggttttgctatccatgttgaattcttgccattgttttaagggacttgttatttctggtttattgtttgatgttggtacatattcactaaattttggctttttttgttgttgttgggattcttctttcttcttcggtttcgaattgaatttatgtataatcaaccgtggagatttggaacttgttctgtatttattaccttgtgatttatttgatatggagtatggagtctcgtttcttagcctatgatttatgcatatattggtttgatgaatgttgccaactttatactaattgtgattctcttattggaggagaatataaaaagtattggtaactgctccaaaatgttacttgctgttgcatcaaaattgttttgctggttggttgagtttttggatgaagatttgagcaacctaggcatgatgtagacacgttctgtgaagctgtccatttatgactttggtgtttgtgttgatcaatgatgcatgtgcactccattttttgtgccatgcacatgctaggtacaggtacacattgtatatggctaggtacataataggtgtgtaccataatcttttatataaagatatgagtgatgtgatcatgtgactgggtatggcttgggtatcaactaattttatttaccaaaaatgttatcatttccccaattgaagatatggtccccaccctctcaattcatccttaccctatacctgatagttgtgagcagagtgtctccagtttaatgcatagacatgggttatgtatcttgctgcatcaaaactgatttactgtttgataggatgccgtgcaaactgcatgttctcatttttatgatttttgatatttttgtgttcatgtaatggtgtataactgttgtacatgtgggggctatatggttattgcttctaccaatgatgcctttcactctattgatcaaatttaccagcatatgatcatttaaaaacattttattatttctctaaaagtcgtttgaatttctttgtagagaggttgaaaatattaagaagccattcactcctcccagagaagtgcatgttcaagtaacccactctatgcctcctcagaagattgagattttcaaatctttggaggattgggctgagcagaacatcttgactcatcttaaacctgttgaaaaatgttggcaaccacaagattttttaccggatccttcctctgatggatttgaagagcaagtgaaggaactgagagagagggcaaaggagcttccagatgattactttgttgttctggtcggagacatgatcacagaggaagccctgcctacttaccaaacaatgttaaatactttggatggagttcgtgatgaaacaggtgccagccttacttcctgggcaatttggacaagggcatggactgctgaagaaaacagacacggtgatcttcttaacaaatatctttacttgagtggtcgagttgacatgaaacaaattgaaaagacaattcagtaccttattgggtctggaatggtaagatcctatacaactgtagtctattttggtcttccgcaatggtagttttattaatgaatcacacaatcatgcaatgtcaaagaaactcttgctacccatttatggatactttatttgtttgagagggtggggggataactgcctgaaatataaattttattgattaattcctctggatgcattaatgtgtcactgtcagcaactttcatattcacatgaatgtctttaaactattgaaggatcttcacagaatgaagggctagatttcaaagaatacgatgacactttcctgaaattcattattaaaatagattattatgttgctctgaagttattacactaattgattcttcatagctgctgcttttgtcactttttgagtattgacctttcttgactgattgaaattgatggataggatcctcgaaccgagaacagcccctaccttggtttcatttacacttcatttcaagagagggcaaccttcatatcccacggaaacacagccaggcttgctaaggagcacggcgatataaagttggcccagatctgcggcatgattgcctcagatgagaaacgccatgagactgcatacacgaagatagtggaaaagctatttgaggtcgatcctgacggtacagttatggcgtttgccgacatgatgaggaagaagattgccatgccagcacacctcatgtatgacggccgtgatgacaacctgtttgatagctactcttcggtcgcgcagcgcattggggtctacaccgccaaggactatgctgacatacttgagtttctggtggggaggtggaaggtggagcagctaactggactttcaggcgagggaagaaaggctcaagaatacatttgcgggctgccgccaagaatcagaaggttggaggagagagctcaagcaagagtcaaggagtcgtcaacacttaaattcagttggattcatgacagggaagtactactctaaatgcaccaagggaggagcatggtgaaatcttccggcaataccgttctgagaaatgttgaatagttgaaaattcagtttgtcatttttatcttttatttttcctccttttttggtctttgttatatgtcactgtaaggtgaagcagttgttcttgcatggttcgcaagttaagcagttaggggcagctgtagtattagaaatggtattttttttttttgtttcgcttttctctgtggtagtgatgtctgtcgaagtataagtaaacgtttttttttctctggcaattttgatgataaagaaaatttagttcttctgtggttggttcaattttgccatcgggtaactgaaatatatgctttactaggtaattttgttgtgtatcattctgaaatatatggtttgttactatgttcatatatttgtatacgctacgttaacatgtgagaagcccgcaaacaaaaagaacctgttgtatttcctgtttttaacctgttttacttcagtgctttaaattcagttgttatattttaatctaatttattaataggtttttaggttaattttttttaatgacttttttatgcttctaaaagtcctgaagttttcataaacgaatctgtttccgttacaagttcttaggactaaattatagaaatggccaaaatctaattcatacgataattaattattaggatgtgtttaagtattttaaaaatgaacctctttttaaagacatttttaaaagtgttttaatacaatgaatcatggatctatccaagaatagatttatggtgaatgaataagtgtagcatcattgatgaaataaataaaaactattgtaaaaaaagactaaataataatgtttttgttaattagtgtctaaaagaattttttgttaacgaactaaaaaaaatatttattataaaactcataggatattgtaaaaaaaaaaaaatcatagatgatataattttgtgtatttaataaaaaaaattcttttaatttcttaacaaatatcttaagaataatggttaacatttgtcaaataataaataaatatattatttaaaacttaaattaataaaaatatcaaagtagaaccatagatctttttcactctatcaatcaatacatgcctcctccaactcggatcctgacaattgacatgctgctcaaactttgctggctgtgagggaacaacactttcaccatattcaaactcttgggttgttatggacttctcatccatgtgatccttgcctaccctcttcaactccaatttagatatctttatacctcaacaactgctatgttgttttaca

SEQ ID NO: 305 - DNA, 5853 bp, Glycine max
tggtaagaaaaatacataatgggaataaatatgatttttttttattaatataaattaatagcattttgatagaaaaaatatttttttaaaattaatttatatataaataataaaaaaattaattatcagttcaaattaaaataatgataaaaaataaaatagattattaatcaatgttgatatgaaattttaataaataatataattattttttatttgtcaaatgtaatcaattaaattttactttttgaataattagtacttaaagataatattaattaaaaaacattgtcttttttaatgcaatatatgatatataacattataaagtttaaattgtcattttggttttccataattttttaaatttatgattttaattttcttgtattttaattataacatttgatttttctaattttataaatgaataatattggtccttcttattaagttaattataaattaacaaaaattattaattattaaaaaattaataataatcacacttctccataatattgtattttgtttcacctccactgccacataggagtccaccaatagtaacaatatattaggattaataattttttattaatattttaattattaataatttttatttaatttataattaattaaatatctttaataatcataattaataattaataatttaatgaggaccaaaaatctcaatttataaaactaaaaataaaaaaaaataaaaaatttagaagcaacaagattataatttagcatatgataaaatataatatatgatgataagaagaggatcctagatgattgcccttgataagttgaggtcgtaaagatggacggcacaggtgttcccaacactagaacgaatgccattggttggaacaagcaaaaggcgcatttctattggtccacgtcatcattagtgacatgttcgtgcgtcaaagcttcaagttcaggaattgaccaggtttgggcactacataaaagcctctcgctccctcgtgcaatttcaaaattacattacactctcttcgacctcgcatcgcaccttcaacttaacctattccacttgtaatcgtaaacgctttgctagaagaagagaccaagtgtgtctgtgtgtgtgagagagagagcaatggctggctcgtgggcacgccgttctctgattgttctagccatcatttccttcggtaatttcacctcctaatagatctgttcatgcttttcttttagcttttgcttaaatgcgcaagtggaaaaatgtaaccagatctcgctttgtttgaacctttttggatctgttttgtttgattcgtttcgtgttacgtagcggtagatcagtgactgagatctttagaagtaattgtttaggatttcgtaaatcgtgctgtgttgtgttcttcatttcagtgaagttctttgcgaactcgttagttctaggatcttacatgtttgtgtaatacgcgtttctctgcatctgacaatttcgtcaacagtgatcagttctagttgttattccgatttccgagggagcgttttgttggttttgtttttgaaaatgctaattgttgcaaattacttttcgtaaccaacacacgtgcctctgatttctgttaaatcagtttttatagtatttcgtaaccaacacacgtagtaccattgatttctgttaaatcaggttttttttaatatattttaaattttttgaatcaatgtttcgtgcaaatatgtttctaactaaccagctgcattctcgtttgttttttgttttttaagttgttgataaagattttcactgttaagccgagtgattagtattagccatggaaataagttttgttccattgtgctgcttaagatttttgctttcattgcatgcttttttcaaaggattggcgttttcgtatttgcgatttgaatatgacatcgagaagttttcctccggctgataattgaatacatatagaaaaaagtataaagtaaagtgtcttcatgttaattttgttaacgtattcatatcattattatcatttgtcaagcacaattatgtgcaaatgcagaaattaactgcgtttcgatgagtttaagtgttgtaaaaatttaactatgtaactaacattgagaaatttctccataggatgtctatttgcgatttccattgctaaggaggaagccaccaagttagggacggtcatcggcattgatcttggaacaacctattcatgtgtcggtgtttacaagaatggccatgttgaaatcatagccaacgaccaaggtaaccgtatcaccccatcgtgggttgctttcaccgacagtgagagactcattggggaggctgccaagaatcaggcagctgtcaacccagaaaggaccatctttgatgtcaagagacttatcggaagaaagtaagacttgctcaagttgttgatttttgacaatttgatttggtgggatcaattgttactgacttgcatctttttgcaggttcgaagataaggaagttcaaaaagacatgaagcttgttccttataagattgtcaacaaggatggaaaaccttacattcaggtgaaaattaaggatggtgagaccaaggtgttcagccctgaggaaatcagtgccatggttctgatcaagatgaaggaaactgcggaagcattcctcgggaagaaaattaatgatgctgtggtcactgtcccaggtaactggaagtctgaaacaatttgcgccttatttctccccttcaatttgattgttttcctcctgcttttgcttttattccaatttctcacatttttgtttcaaatgcacagcttacttcaatgatgctcagaggcaggccaccaaggatgctggtgtcattgctggtctcaatgttgctagaattatcaacgaacccactgccgctgccattgcctatggattggacaagaaaggtggcgagaagaacattctagtctttgatcttggtggtgggacctttgatgtcagtatcttgacaattgataacggtgtttttgaagttcttgctacaaatggagatactcatcttggaggtgagtacttttatacacatacacacaagagaatgaaatgaaattatatattctttccataaaattttctttctgatgctaatgtctgctatttctgtttccccttactaggtgaggattttgatcaaagaataatggagtacttcattaaattgatcaagaaaaagcatggaaaggatattagcaaggacaacagagcacttggaaagctgaggagagaggctgagcgtgcaaagagggcactcagcagccagcaccaggtccgcgtggaaattgaatcactttttgatggtgttgatttttctgagccactcacccgagctaggtttgaggagttgaacaatgacttgttccggaagaccatgggtccagtgaagaaggctatggaagatgctggattacagaagagtcagattgatgagattgttcttgttggtggaagcacaaggattccaaaggtacaacagcttttgaaggactactttgatggaaaggagccaaacaagggggtcaaccctgatgaagcagttgcctatggtgctgcagtgcaaggaagcattttgagtggagagggtggtgaagaaaccaaaggtaccatagtctgtaaatattatttatggaagtagattgctaagcattacactttctaattgttgtgtggcaatctctatccagatatccttctcctggatgtggctcccctcactctcggaattgaaactgttggtggagtcatgacaaagttgattcccagaaacactgttatcccgaccaagaaatctcaagtgttcaccacctaccaggaccagcagactaccgtctccattcaggtacggtgccattaaagggcatgatgcgtgtttttcttctaaatccaaaatgcaccactatctggtgaactatgatgggattgacttgaaacgattcactgcttttttcttaatacaggttttcgaaggtgagaggagtctcacaaaggattgtcgccttcttgggaaatttgatctgtctggaattccaccagctccaaggtttgttacctgcgttgatgatgcagtgtcctctctcattattgctccatatattaatgttagtaaattcattggtggtattatatttgggtaattgaacaggggcacccctcaaattgaagtgaccttcgaagttgatgccaacggcattctaaatgtgaaggcagaagacaagggaactggtaaatcagaaaagatcaccattacaaacgaaaagggacgtcttagccaggaagaaatagatagaatggttcgtgaagcagaagagtttgccgaggaagacaagaaggtgaaggagaggatcgatgctcgcaacagtcttgaaacctacgtatacaacatgaagaatcaggtcagtgacaaggacaagctcgcggacaagttggagtcagatgaaaaggagaaaattgagactgcagtgaaagaagcattggaatggctggatgacaaccagagtgtggagaaagaagattatgaagagaagctgaaggaggttgaagccgtttgcaacccaatcatcagtgctgtgtatcagagatcaggaggagccccaggtggtgcaggtggcgaaggcgaagacgaggatgattctcacgatgagctctagattagtctaaatttttatcatatatgggaaattaagaattcccctgcgctctgcgcttgcttttttggtgccgatgataagatacttgtgaaattacttttactttgtttttttgcttagttttacgaccaaacttcttcatgagtctggtttcacttctattctcttacgctcttcttttcgcgtgcttctccgttaaaatgtgctctgatgaaattaatccgtctctgcccatgccgaccataagtttttaattaagtctgtttgtaatttaaaacaggtaacttccgtaaaatattattcagccattttataaaactcacgaatatcaaatttctatcgattgttatttgttttttcacttttacctggagcttgtgaataaagttcaaagatggattcaccaatgtagcgtccggaagttagcgtgacgcgtttgagtgttatcgctttttattgtcagagaaaatagaaaaatagtaaaatataatggctgaaaatttagaataaatatttttgaatacaggcccagctgaaaacaccaaattagatttcacttcttttcttgaagaaatgaaaatacgacattttttagtattttttttatgtataatttttaaatcttaaaaaaagaaaattatttaaaaaaaataaaaaaatagaaacagaaaataaatacttaaatcaaggatgccatctgtaatttcggtttctaaaatgatgatttatgttgttttatcatttttttatacatggttatagtgtcatgtcatcatgcttgttttacatagtgcccgcacctcttgcctttctattctttaacaatggttattgaccaaggagggatactgttattgaatttgacgggattagacaaggcaatggagaagcggttatataccttgcccacacctacagaatatatacttctagtccagaactttttataggattaaattcatcgttgccaattatgttagtccctgtttggtcaatgtcgagaatgcggttcaaatgactagaagttagggatttatggtaacgaaattcgttgattttttttgtttagaaaaatcgtggttttgttcaaaatctgacattttgacattcttggttcatctatacgtcaaaatctatttcttctaaatctgtttt

SEQ ID NO: 306 - DNA, 5086 bp, Glycine max
ttttttaatgttaagattcattatttgtgttatttaggttcacaagtaaaaagattggtgaacaaaattgttgattgatttagcaattttcttatgcactaatttaaatatttttattattaaatgaaaaattatattaattttaataaaattgttagcattaaggattattttaaatattttaaaatgaaagatattttaataaggttatgttagacaaaattaactagaaagctaactaacaactagaaacttttaagttagcttattaaatcataatatttggtaaaattagttgttcaagtagtttaaaaatataaaatgacatatttaaaaaagataataaaaaaattgaataaatattttaaggataaaaaggaaacaaaatataaaaagttagaagattttaaaaaatgtttctccaagtaacatttcaaacaaaaaaaaaacgctaaaaactacttaaaaaaatttgtttatcgaacaattaaataagtttttcagatagtaagaaaagttagaagttagttgaaatggttttcctaatattgtataagaaaacattcacttaatttaaaacaaaaatttagtttattttctatgatattaaatacaaaattataattttttagtccttaacatcatttattagaggtaatgttaacaaaattgtaattataataataaataatttaatttttttaatgatattaacataaaattttatcacataattaacatttttttaaaatgatcacaaaagaaattatttcttcataaaataaaataaaaaagatttaataaaaagtaatgatacttgtacaattaaaccaattaacggatctcagccattgaaaatttgttgtgccacgtgtctgattaaaataaaaggaattggagatgttcatttcttagataaatgaagataacaatcacgcagagaatccactctcccctcttactggtaactacataaaaggatgcgcacgatactttcattagttgcatcgaacagagagagagagaatggcagcacttggtgggaatcgtgatgtgacaggaagccagaacagcgttgagatcgatgctctagctcgctttgctgttgaagaacacaacaaaaaacaggttttctttctttcttttttcttataaaagatgaaagaaaatgttaattatgctttgttctgcatttgtttgtttctcgagaaattcctaggatttgttttaaggtgttgctttttattgggtcaggccgatgatcggttttggccatgttaacgtttcttcggaaatacacatgttgaattagattttctatcttttcttttgttttatgaacaattattgacttttggaattttcgtctggggatagtagatagttggttaagtctatttttagaataattatgagtaaattgcacttatctctctcgtggtttcttgagattgcacacgctctcttacttgtaatatctttcaaacaattaaggagttagttgaatgtgtaagagatgtcaatcttttcaaacaattcagggagatagtgtatgagtagaaaaagaaagagtatcaaaagaaatttgactaaattacaggagtgttagtgtagtttaatctataattatttatagaacattcacgtcttttctctgaagtgagagagcttttgaaaaataagccaatatttccaatcatgcacttactctccaaaggttacggttgatatagtttttgatgttacaaatggtaaattaaatattgacttcaacgagtactctgaaattgacattaccgatcagtttcatagagtattatcaaatcaatcaatttagtttgcgaaatcagcagctatcagttaatgacattgaggactatattgattgatgtgtaccaaaatgaggatctagttgactgacaattgcaaagttaagaaccaaattgcttgttcatatcattaagcactaaattaattgattgttggaacctcaagagatttgttaagtagagtaagacataatcctgcatctaagaggttgcatgtttgaaccctcattcgtttatttggagtggggtaaatgtaagttcttctgtgaatgttctttgagcttggaggctttttctgtcttgtactggggcattacccctcccccaaaattttgttcaccaaaaattaattgattgttaggataaatttgcatttccattatgtcaaggaataaatagattggtagggtcaatttcaataaccacgaacgggcttctattttctttttattttgtggtaaatatgaattatattttatttttattgaattgtaaatggctatgcagaatgcccttttggagtttgaaaaggtggtaactgcgaaacagcaagtggtttctggtaccttgtacaccatcactttggaggcaaaagatggtgggcaaaagaaggtttatgaagccaaagtttgggagaagtcatggttgaacttcaaggaggtgcaagagttcaagcttgttggagatgcacctgcatagtctagtgcttaattaggtatttgataacattacacagtttcccctgcttgattattaattatgaaattgtttatggatgaatgcaaatcttcaatagtattactatcaacttcttttttgcttttgctattcttaagatggatcagaaactgaggttagaatgaatggggaactaagtggggtaacggagttaaagaactagaacttgaagtttggatcagtttttgatttacacattgggcattatttgtcagtacagtgcttgtgatattgatgattgataatgttcattcattttattggtgctttatataaagttgaacaagttgtagttttactggcatgtaattactatttactatctggtgtataggtttctatgtaacatgtcaataagttgttgattatcattgctataagatttgcgggaatttcattttttcattttttctgatgaatcagctttgagggtaatgacagtgatatattgtgaccatgaagtttgttaaacagttgatgaaattattcattcgagattcactccagtttttttttttttttttgcttcccctattctgatagataaattgcaccttagcatgacttttggaagtgaaacattttatcataaaatttctctgagtatttacggcacagggattgggggagaatgaccttttgatgtactttaaggatcaaggtggagtattatatgactaatttagtgctcaaaagtgcatttatttttttgagaaaaatcattttaaagtgagtcattttcagggttatcatttgctcaaattctcttgaacccatttacatttatttgcttgtcctgaatcatggtctctgtatactgcattccttttagtagcaatagttgtgggctgttagtccaatatgcattggtatatttctgtgttttaccattaacataacagctgaataattgtgggctgttgctgtggttctgccattaccttagttttgaactcaggatgaagtgttgaaccctacacccaattaagggatgggtattgacagagtattccctttagtgatttcaagaataacactcatgacttcacttattattaagtgattttccactcttgctctctttctgcctaataccataaaactttcaaaaggctaataatggattgcaaatcaacataactttatcttggaaatccgtgccaaccttcaatattaagtcaattttgattagagacatcaaaagcactttagttaccgcagctaaattttgtctctgttaacatatgccttcatgccccaagtagtattgaaacttctaaaggagcttttcttgatgtctcaggttgctgaagagtgaagaatgagacagcctggttcgaaggggaaaagcctaaggatatatcaaaggatcctatatgtataaaataaatgttgcttttttaccttcggtattgatatctgaagtctaatttgacatcctatatatgaatatatgatctatgtgtttctttctctccctacctctctctcttttaaagattcaaatttggttttactttttagccattgtaagtgtattaacatcaatacttaaatctatatctatatctacattataatctatatctatattataaacattgaagctcactgttggagaagtttttacacgtgacatgaccaaaagcatctggcaattttcaactctttgtaaagcatatcacttttagtcaacatcgtggagtttgtgtattatagtggaacttaaaaatcaaatttagttttactttttaggcattgtaagtatatcaaggcctaaattaatttatcaacgtcaaagattaaaaagattagtaattaataatgtaattagagattaatcttaccaaattgaatgaagttgtgatccatataacctatatcatctaagacgacaagactttgttattgttgttgtaatataaaaactaaagtgattgatagctctgatttgaggaatcaaaatatttttccacaatgtttaagcagtcataaggactagaggtggcattgctaagggctcatgactgagccatgatatggaggtgccagtccgaaggacacaccatagcacaaagatggtagtacatagggcacatgatagagcaacaggccggcgcaaggacaagtatgtggtttttcgtacctttacccatttctccaaaatcatctccttctttggttggaatggaattttttctccattctcatttccattggagatcgcgtatacatgttccctactcatcttcggccaataattataaaatatttttttgcaaaataattaaataaaaattattttgaaaaattgaacaaagttaaatgtattatttattcaagtggtaaagtttaggtgactaacttgtcataactaaatataaaatccagtcctataaaaattagatccccatcacctaaaaattattgaagacttgaaacatgaaaagagagcctaatgtcttataacttatatttgtggagtcttagtttcaatttttaaaataatagaatagaca

SEQ ID NO: 307 - DNA, 13349 bp, Glycine max
aaaatatgtaattttatgatgcaaccaccgttgttgatccaattaagcaagaataatcgttttttaaggaataatagccgttcttggcgagttaaatatatacgagtattttgatggtttgtttggctttttttctttctttctacagtcgtattttcccacctagaagaattttattccaaccattttgtttacatatacaaagatttgattctaaaacattggtaaacacattattctaaaagacatttaaacttaaatgtatctataattttttaaagttaaatgtatttatattatttaaaaacttgttttggaatgattttatatccaaatttattatgttatggtggacagttttcagttgggcttcaaaataataaacattcaatttaactacattaaatatatagaaaagaggtgatgtaacatttgtaaaaagttgtaatgcaatcttctttatttatttattgattttaaaaataattattttaaagtcattaattttttaattttaaaaataattattttaaagtaatttaagagcaaaattataaatttggtcccctatttgtctaacaattcaattttgattctcttataatttaattcatgaatttagtttgacatgttgtaatcttcttatttcagtctctaattttgatattaattacttatcttgattgtcatatatgttaagctttgattggaggttgatcactttatcgcgatttcattcaatgttaattaggtgcatggaattaaccgttccatacaagtataacacacgtttaacataaacaagacacatgcgtaatcaacctgagaaaaagttaaatgtctaattttgaaattgaagattaaaataagggaatttcaaaaagttgagaaactagaattaaattataaaaagaaaaacgaattttttaaaaaaattaggaagaataaatttgtaattttactaaatggtaatttatcatcgaataacataaataagcgaaagaaggtgtcgtgtgagcagagagaatattattagcgcctagagacaaagacgatcaattcatcacaagcaagttcccatgaccggtaacgagtttcgcttcttcttgtcctgcgatatcagtgttcctgtcaccttccgcgtcgagcgccttgaaggcaatttgccccttccgaatcccaaatcacccgatttaggtttgtttccccctcttttctaaaatgctcattctttttaagatccaattcaccaattaattaaactggatgattgcgcaattcataatttcagttactatttccttacagaaactaatgcccccacagagaatagaacaaaagagttgtttgtggagtgtgctttgtacattgatggtgcaccgtttggccttccaatgagaacaaggttattttatttttaatttaattgagctattttgcagtatatacttctcacatgactcgactttttagtataaaatttaccttgctagtttcaactgatgtactgattactgaataaaataattatcatggcttgagatttcttttgctgatttttctcttttataactactttcttttgcttttttaaaattaattttcggatgttttctcttgatacctcatatttgttactcaatcagctatgccataataatattacactgacattttattgtatttatggattttgatggtgaaggttggagtcctcaggaccatcatattgttggaatgagctcatcactttgacaactaaatatcgagacttaactgcccagtcacaactcacgttcactgtaagttgcaactttagcttacaagcttatttatacgttcttcaaatagtgatggcacaagactcgttctgtgtccatctattgtagcaagaattgcaatctggttatgttttgccttgcataaaatagaattgtgtaaattttattagcttctagccttctacaaaatttacttaaaaatttgtgaagtgagtttttatattttggtaatattgttgtgtaaataggtttgggatctttcgcatggtgaaggattaattggaggagccacaattcttctcttcaacaacaaaaagcagctcaaaactgggaagcaaaagcttaggctttgggcaggaaaagaggcagatggaacattccctactagtacacctggaaaggtaattaaaattttaagtgaacttaggttccattttttgttcaattttatgaattttttcagtcctaataagcatactttgaattgtcctcattaggtccctaggcatgaacgtggggaattggagcgattagaaaagcttgtgaataagtatgaacgaggtcaaattcaacgggtggactggctggatcgcctgacatttaaaactatggagagaatcaaggaacgcgaaagcttgaaaaatggaagttctcatttgtacctggttgtggacttctgtagttttgagcatcgagttgtttttcaggtattcttgcctcctagttgtgacattgcccaaaggattaatctcacaacaatgcctggggggatatttagtcaaataacaaatattctttaaaatgttaaaatgatgtactggtttccccctcccagtatgtgatatattcctgcatcaaatgcttttgtatttccgatcatcatgttaagtttaacaactaagtaaattcaaatgtacatgggattcctagaatgtaatcttggcctctcaggtttgcaagcatcctacatttctaagactattaacatttcatgcatataccatataagttattgagttaacttaccctgcatactggtgtgaagttgccagtttacctttacgaagcaacccctgaagttattgatgcagttttttttttcttttttaataatataataaatgctgatacagatcctacatgtgcattaactcatatttgttagaaaatgtaggaatcaggtgcaaatttcttgtttccatcacctatagcctccaccaatgatattgttgttgtctgggatccagaagtgggaaagataaatccctctgagcacaaacagttaaagctggccaggagtttgacccgtggtgtcatagacagagatctgaagccaagctcaaatgagagaaagtaagcttaagcttttgtgtctaaagataatttccttgctatatctatgatcagattaataggaatgatttacctcttcagtacttgaaatggttaatttgctctgtgacatatatagtcaatggagaagcgaacgcaattaacatgttaatgaagtttcatttccaccaatgaagagtgtacactttaaagaaaggggatatatatatatatatatatatatatatatatatatatatatatatattgctgaattaaagaaaggggacattttcatatcagagttgatgcaacacttcaaaatacatgtgcacgtatcaaagtgtatcaatgtcagtgtcaatgatcattcttcttagatagccacattttaatggcaggtggttctaaactaaatgattttgtgaaggaaaagttattaatgtgaaataattgaaataaggtatttacttctaggaccatgttgtccttactttttgaagtgatttagaccattttctgtgagataaacgaaagcaaataaaccatcaaaatatcagttgaagaaatttttggattgcattgttatttatattagctgcaaaattttatcaagtgttactagtagctcttttggcataaaactttttcttttcttttttctagttggttttctctttggttctgttatgaacaatgtctcttccctctataataataataacaataataatattgtgcttctttatcttttttaagatataaatgattgtttaacactttaactgttttatttgctcctttatgtcaaggtccattcagcgaatactaaaatatccaccgacaaggactttgagtggagatgagaggcagctcttgtggaaatttcgattctctttgatgtctgaaaagagggctcttacaaagttcctgcgttgtgttgaatggagtgatgtccaggttggcctttattatcttggaaactagtaatggatattatatatgatttcaggtatgctataggtctggtacttaaatgtaaggaggtcttctcatgagtcatgacaaccaaaaccttaattgtggctttctccatactgcatcaattcattcctggggggaaaaataaaattgaagaattttatatttagtgaaattgattgtgtattggctgatttttttttttttttttgtaatcaattggaaatcttagtgcatctttcctttagagtcaaatttatttccaaaagggtatctagtgtgaaattctgttctacaggtgaagttgggaatatatatatatatatatatatatatatatatatatattagaatattgtaagagagtagcagttattcaactgcactcttgggtagtttactctagttaatactcatttctaaaatctttcatttttttcaaaatatcttcatctttagaactctgttaatacacgttaatgaatttaatgcgttgtgcagcagacttttggggtctcatgtcattgtctctaactctattcaaatatgtaaactttttctcccctattcactgaacatgtaattgagccctagttatctaatgttgggtataataaagcatagatcaagaatgaccttaagtgaaaccattaaaaaggaatttggtttaaatggcctctgtagtggcttttgatggaacacaatggtgccatttctttcagtagcagaaccccactagttggatatgggaaaaaaaagctttgctttagtttttttgttaattgatatttgattttttgtttcttgaataattatcttatctctattttttttctcttgaattcttattgctaaaaaaacacgggtaaaaattatcattgtccaatgctgtttttatccaggaagcaaaacaagcattagagttgatgggcaagtgggaaatgattgatgtttgtgatgcactggaacttttgtcgcctgtttttgaaagtgaagaggtaattttacagagatattagtgaaaattctacccaatattggtgtaggtctttgggtttatatgaattaggtttgcagtacaatgtagtgcaatatagtgcggagaactctctacgcattaatcatattcgtaatgacctcgacacgttaatcacacgagtaatactcttactgtcaacacacatactagtaagaactaagaaagtatccctctagttttcctacatattgcttgttagtttgaaaaagaaatagtaaaaggaaaatttatcagatagagaagtggaaaattaccactagcaactaggggagagaataatatatcttccacaacagacagaactggatttaatgaagaacaaatgaatatagtaaatcagcccaaaatctgtagcaagtgtaggagcaaaatgccattgcactcccagccttactctgttgttatagatgtatcacttaatatctcaattattttttttactcaataggagaaatttatacacctatagagaactatttactatacgaggccgtttctcaactgcttcattccaggtccgtgcttatgcagttagtgttcttgaaagagctgatgatgaagaacttcagtgttatttgcttcaattggttcaagctcttcggtttgagcgttctgacaaatctcgcctttctcatttccttgtccagcgtggtacatgcatgagagtttaagagctatttcaggtgctgtttctagttatatttggctttttgctgaaagtaacctaaattttgacagcattacgcaatattgaattggcaagctttcttcgctggtatgtggctgttgaactttatgatcctgcatatgccaaacgattttactgcacttatgagattctggaggagaatatgatgaaggtttgaacttatatttcttaatacctgaacatttgctcagtaagttttgcttctgcgatgcttattaatgtgataaataattgtctcctttttacatttgaaaaatagtttttcgagatgttgtacattgctttatgttttctttatttggcctaaacctaatccatttctgcatggttcgtaactgtactcctacattataaattctttccatatttgaaatttgtcttcttctatgagtaagttgatttctttaataatttttgtttccataatgtacaccttgaagaagcctaacagatctataattattagacaatgtaataattttattcttgaataaaaaaattgcaggtgtaacctggcttatgtaattatgtataatgatttcatttgtgtggcataattttttttattctatatcatgcaacaattttttgataaaggaatctaactgatgcaagtctgcaacatattaagttcattaataaatttaatgtgatagaaactagaaagctagttggattaattacttccggaacttgacaattatgccccattgtctcagatagcagctggtgttaatggagaggaagatgggtttaaacagtggcagagtttggtacgccagacagaattgactgctcagttgtgttcaatcactagagaagtaaggaatgttcgtggtaatacacagaagaagattgaaaagctgagacaactactttctggtcttcttagtgaacttacctattttgatgaggtaaatatctcacatgaagctgtatcgtagtttattattttcatcttttactttacccttttagttaatgatgcatcttgaagaaactatttatttccaataattatatctagcaaattcttagaaggttcttcaactgtatgtttattgttgctttatttcacttgtagccaatacgatcacctttggcaccaggtgtcctcattgctggaattgtaccttcagagtcatcaatatttaaaagtgcattgcatcctttgcgcctttcttttagaacagcaaatggtggaacatgcaaaatcatatttaaaaagggtgacgatcttcggcaggaccagttggtattcctaccaatccttcttctgtcaccctgttatgcatgcaaatgaatacctgtgtacatgtgtggattgatgcaccaaaaaccacgtgcctgtccatgtgctcacacacgcactcatgatggatatttagaagacgtgagttgaattacataaatgttggctttatgtaggttgttcaaatggtatcactaatggatcgattgcttaagttggaaaatcttgatctgcacctaacaccatacaaggtgctagcaactggacaagatgaaggcatgttggaatttattccatctcgctcattggcacaggtatggtgatatactttttttaaaagttgtttcttgtattagcacgtagtcactgcttctttttgtgacttaaaagagttgagagaattagggagagaagaggagattgagaaaatcaatattattcaacccaactgtaactgattacaaagatgagtatatagttggataactgccaactaacctaactgtcaaccaacctaagctagttgacagctgttacaaagctgttaggcactaactgactaaattatcaacaactgataacagctaactactaactacagtagttagaatatcagttaactgacagaaacaaaaagaaacactgcgagtaatgtattctctcttatactcccccacaagctcatgaggggttggaagaatgtctttcaactactctgagcttgggttggacctgaatgaaagaaatgaaggagatagagccttggtcagaatatcagccagttgatccatggcaggaacatgaacaacattgagttgtttggtgagaactttctctctgacaaaaaatagatccagctccatatgcttggctcttgagtgaaggacaggattatgagctaatgaaacagtgctggtgttgtcacacagaataataggagtagtgtaagctacttggagttcagaaagaagagattgaatgcaagtaacttctgctgcaataagagccatgcttctatattctgcctcagtactagaccttgcaacaactgattgcttcttagaccaccaagagatgagttcaggtccaagaaaaatagcagctccagaagtagacctcctatcatcaggatcagagacccaatctgcatcataataggcatgaagaggaaagggatgcctaagagaagcagactgaaagtgtagaccccaagaaacagtactgatgagataccttagaatccttttcgcagccaaccagtgttgctcagaaggttcagacatgaactgacaaaccttgttgacagagaaactaatctctggtcttgtaatagtagcatactgcaaagcaccaaatatggacctatgtaaggtaggatcaggaaagtcttcagaaccaaacttggtcaatttacaacccccaaccataggagaagagataggatttgattcatccattttagtcttggccaagagatccctgatattactttgattgagttaaaatgagagaaccatcattctgtctttgaacttcaatacccaaaaggtagtccaagtcaccaagatctttgagggagaaaacagaattcagttttgaaacaagagaatgaatcaaagtgttgttaccgtgataatgatatcatctacataaactaagatgtagacaacagactgattctcagaaaaaacaaagagagaaggatcacatttgcttgaagaaagcttgaagctgagaagagtagcttttagtttgtcaaaccaggctctaggagcctgctttaggtcataaatagctttatgtagtctgcatactcgagtcttattggaagagacaaatccaggaggtttagtcatgtaaacctcttcctcaagaatgccattaagaaaagcaatgttgacatcaagctgttgaaggggacagttgtgagaaatagctagagaaagaatcaacctaacagtcacaggtttgattacaggaggaaaggtctcctaataatcaaatcccaactgttggtgaaaacccttagcagcaagcctagctttatacttgttgactgagccatctggattttcctttactctaaacacccacttacacccaattgctgttttagtaggagggagatcaaccaaactccaagtaccattccttattaaagcatcatattctgattccatagctgtgtaccaagaaggatcagcaagagcagctttggttgattggggttcaaaatgagctagtaaagattccttattaaatctctcatatgactgaaggtttcttctacattgatatatagtaagactttaattttgacccatcatgattttttcaatacgatgttgtaacatatttacctttgttaactgacaaaggcattgttaatctaatgctttggtctaagttttatggattttgtctttactttcataactgcttttacattgtgaataatttggtattatcagttgaaggagttaaaaatgattcattatctgtaagcatcatgacatagtagaaaatattaaaaatatctggaattttgtagctttgttttagcatgtgcacttatttatgtataagcacaatttttgtccaagtaagtttatgtttagttgctaatatttttgtgaaaggtttttttattttatttcttcagaattcagatagtgttttacaaaattgttcacagtaggaattgtaatgcctgtcaggttgctaattgctttatgtggttcctttgatatttgctatagaaatttatgaattgcgtataaaagttgtatacttattttttgacattagtaaacgatcatgttggttgtattgtaggatacacaatcttgcaattggtagactaatatataatcttttcaccaacaaaaaagacttatatataatttttcatgtctagattttgtcagagaatcgtagcatcataagctatttgcaaaagtttcatcctgatgaccatgggccttttggaattacagccacctgccttgaaacatttataaaaagctgtgctggatactctgttataacatatatacttggtatcggagacaggtgattgttgattttattcattacatgtcattttatatctaataaataactgagactgggttcaccagaaactgctacatgctggccagaaaatacaggtattggccagttgccggaaagtgcaggtcaggatactgggttgcacgaaggaggcagaggttttaaaccataatgctagtgtttaaacagtggccactggctgatctgccattatagtgcgctattgacaacctaggtttctattgaacaactccccactcattccatcaattaaagaatatgaaggctaaaagcaggaagaaaggaggttgaaaataaatgaagcaggctctcaaccaatttctaaccaaaaatcttaatattttgttatcaagtgttgctgtcttgctgacattgtgtaacttaactgtcttgaaaatttgaatttatactgcatataacttacagacatggaactaaacatataactcacatgttggattatgttgaaatacaaactaacgtgattttagattaatatttgcatgtttggttccatgttaaaaaaactatagatagtttgtgttttgataaaaaataattatattaaattttactactaattttagaataaaaacatttaaacataaattacttcactcaaccaattttaaccaaagtcaattttacaaaaataatttcattgaatttatattttgtccatatttggagtgattttgttttctttggcaggcatttagacaatctcctccttagaaatgatggaggtcttttccatgttgattttggttttattcttggccgagatcctaagccatttccaccaccaatgaagctttgcaaggaaatggttgaggctatgggtggagctgaaaggtacagttctcattagatgattcactttagattcaagactgtggttatgtgatctgtagcttaaattgtgaaatagtgatttgtttctttgttccccatgcagccaatattatacaaggttcaagtcctattgttgtgaagcatacaacattcttcgcaaatccagtaacctaattttgaatctattttacctaatggcgggttccaatattcctgatatagcttctgatcctgaaaaggggattcttaaggtaagctcccttgtgtttcaataaataggtgaaaaatgttcatttgttcttataccaggacattttcgctgtgcagcttcaggaaaagtttcggttggacttggatgatgaagccagtatacatttcttccaggatcttatcaatgagagtgtgagtgcattattccctcagatggttgagactatccatcgttgggctcaatattggcggtaaccccaatatttattgggtgttattacaccaagtaattaaccaggtaatttcttattctattttgaggaaaaacaggtagaaccacccaatttgtattttgactgagatagtttttaccatacgactataagttttgatttcttttctcttttttttttaatacaattttgtgagcacgacttttaagctgtcaaattaaatcataacctaaccactcggtccaaagcacctccccttggctcttaaaaatggaacatcatagtacctgcatttttcattccttttgccgaatctgcagcattttctgtcgaacagaacgattttatctactgaaaacttctgcatgatagacaaattgaaatgaaagttatttttggtttctttctcacattctctctcttgtttccagcatctgatgctgtctttttaggcttcttcgaagcttaaaacgtatgtggttttatcttctcttggaactccacactcagatcccactgcagctgtatgcgcttctaatttctgaactaattatcctgaaggccacttagtgacattgtctatgtaaataaattagttctctttcgctcttctggttacggttgcttcaagactgcagcataacttaaaaaatcgtatcatacacaaactaatggttgtttaagtgaaaccatcctatttcatttttgtaaataactcttgcctggttataatctgtagtttgatatatatgtaaagtaacttttagttatgatgtttggccactttgctggggtaaattatcaaaactgtatctgtaagaactgttgatttatttttatattaataataaattttttattattttaaaatttaaaatgcaaatagctagtatattatagagaaaataatatatgcctttataatgttaagattttttctattatcatttactcataaattatcatttatacttagtttgttgactttaataataactatttttaaagtcataaaagattatttctaattagttaaatagtgtaaaaaaaaattttgcccattaaactctagaagctttgaaagaatcaatagctggtacttttcgttattttagtaaaaggaataaaataattctgatacccttgtttctattgtaaaggccattctgtgataaaaaaaaaaaaaaaaaatagttctaggtttacctctgcgttgaggctgccaaatgcaacaacttagaacattacatcagtctaactttgccctgacgagttcatgtttggtagaagtttgacccacccaaacggaaaatcggagactcattaaacttgattttgtttcatgcaagtttatgtcatgtttggatgaaatttaagaatgaaataaataatatcatactcaaactgaagaacgtctcccttgaggttaataggttattggtgaaccagtgagttattaattaaattgtgtaaattgctatatatttaaaaaatttaaaaattataacttatattatactaaaaaattattaaaaaaaataaccatattctactttaaaattccaatatatatatatatatatatatatatatatatatatatatatatatatatatatattaatattgacagtaagaatatacgtgaatgtagaaggttttctttttaaaaaagtacaaaacaagtaaaatatattttttattaaattttttttaaagtttaatattcagaaataaaagaattcgtataatcaatagtacagccatatttttttgttttatagtcacgtaattacaaggtaaaaaaattacgtgattagcgaaccttatgaaacagaagagtccaaataaataataaataaaa

SEQ ID NO: 308 - DNA, 3630 bp, Glycine max
acgtaaatgtcaataattatttgttgactgaaaatgtcaatcttttttttatcaaaatgtcaatatgttctattggaccaaaatgtcaataagttaacattattggatgaaactgtcaataattttttattgaactaatttgttagatccgaaatttcatttaagagtaaaatataacgttaggataaattttcatcattttttatcgttacaagtataacattagaataattacttaaaaaatatattaacaaacataatttaaaataaatataatattagcgataatattgattatcaatcataatttgtttgtcacaatagaaattatccaaaataaacattataccaatttaccaaaataaacattataacaatgtatcaatccttataaatttttccgaattttaataattagtcacaatatgctataaataaaaaataaatatatttcatatttcacttatttgaatcttgcttattttattagcaatgacggataaaaattaacaattaaatatatttgttacactttttatatttttgaagattaaattttgtattttgatttttttactgtgaacgaattacacaacgattaacattgtttggtttgagtagaaagcaaggtctcaggttttattgtcattttaatactaacccaacgattaacattgcaggaatgattactgatatcgaaataaatccataaaaagtcactaacattgttggtttaagtagaaagcaaggtctcatgactagaaacattttgttcaatttttgtccttttaatttacaatatcaatgaaacatttttattttttctaatttatctttaacaatatacagggaagtgaaaaaaataagaaataaatatataaatgagtgaaaatataattaatatgaaaaataagagatatattaggaaatgcatataatgattttcgtgaaatgtaaaatattaaatttcctttttaatattaaaacggcaggttagctcgaggagcctacggtttggcattgagtgtgaaacaggctaataaatgtgagtggttcaccgccgcaacttccaatgtgcgagcacttactcgtctcactgtcttgctatatttgggtgagaacacagaggatagtggagttcaacgagatggagcaaataaagcacagaacagttgaagtgaatggcataaaaatgcatgttgcagagaaaggagagggtccagtggtgttgttcctccacggcttccctgagctctggtactcatggcgccatcagattctctctctcagctccctcggctaccgcgccgtcgctcccgatctccgtggctacggtgacaccgaagcaccaccttcaatcagcagctacaactgcttccacatagtgggtgatctcgttgcgcttattgactctctgggtgtccaacaagtgttccttgtggctcatgactggggagccatcataggttggtatctatgcatgtttcgccctgacaaagttaaggcctatgtctgcctcagtgtccctctcctccgcagagacccaaacatcagaacggtggatggcatgcgtgctttgtatggagacgactactatgtctgcagatttcaggtttattaattaattctctcattttgcttatttttatcccacccttgtttttctttctctttctaattaactttgcacgaaatttaatttgtttctgtgaaatggggtcggaagattgtagtaccagatgcgaattattgtttttaaaccgtgtgtgtgtaactgcagaaaccaggggaaatggaggctcagatggctgaagttggcactgagtatgttctcgaaaacatccttacaactcgcaatcctggtcctccaattcttcccaagggaaggtttcaattcaatccagaaatgcccaacaccttgccctcttggctcacagaagaagatctcgcctattatgtctccaaatttgagaaaaccggattcactggacccttgaactactacagaaatttcaacttgtaatttcttgattctccgtatttgcccgggataattgttttccactgctctaagttaatgtttctttcttgggaaaatatttgttcaacatgacgggatcccaataaaaaaagaccattaattaattaattattgtatgtatttgcagaaattgggagttgacggcaccatggacaggagggcaaatcaaggtgcccgtaaaatacataacaggtgagttggacatggtatacaactcgctgaacttgaaggagtatatccacggcggagggttcaagcaagatgtgccaaatttagaacaagtgattgtgcagaaaggagtggctcacttcaataatcaagaagcagcagaggaaatcgataattacatatacgattttatcaacaagttctgatcttgtccaaaaacgaattcaaccagatataaagtcgcagctgaagtgaaagggtgttataattgcgcttttgttttgatatttaaggtatcgagatcttttttatgggcaggattcatcaactgcagaaaacctccataccatcaaccttcctatgcttgtttgtattaattaactgataataatactgtatggtttggtacttgctaaataaacttagtcttgtcatgcaaatggtatatcttaaaaaatgttttgaaatatgtgtatttggaactaagcttcaatgcgtgtgtgtattatctcgacataatctcgtagaaaatcaagtgagggaaatttagtttttgccattagagttttttcgcagttgcataatataaactgtttaatgaattaattgtttttaaacatggcaaaaagatttattaaagaaaaggcaatggataaccacaaggtgtgacaaggtcacgccccaaagtctgtaataccaagcaaaccagagtatgctaagtgcttacaacccatcccacgacttcagacaaccaatgtaaaaacactggttatcctataacagaaaatataccacccaattcatctcatataccaagcctagctcccaaagtgatgtaacagaaaatcttaattagaaacagtccaatactacccaccctgcataattcagtgagagtactgtgtaatgagttaataacttttataatcatggcaaatgagaatataaatccctcattggtgagcaacctaacccattacaaatcattcacgttaaaagctcagtagtcgataattataattaaattattatgatattaatttcaaaaactaatattatatattataatttaaaattattcttgcaataagaaaatgttattattttcgtcgtaaaggaaaagaatgaatcacattaactaaaaaaaggaaatgggtttatcagtttttaaacatgtttttagttatcgaaagtttaggaagaatagatgatgatgtcttagtacaagaaagaaagattttgggcacaaagagttacaacttattttgtacatacaaaataggagtagaaggttatatttttcgcttcaaaaagaggagtagaattttgtacataccacttattttaattagtacatgcatggatttggatgaattgcgaaaattcaagctcaaatttatttgatctagtctaatttgtct

SEQ ID NO: 309 - DNA, 3457 bp, Glycine max
atacccaacaatttgtttgagtattctttgattgtctctgactctttcatcctttgaagctcaaatttcctccttaaatttagcacttgcatgcttcgtattctatcatccccagcgtattcctctttcagataatcccaaattgctttgggtgatttaagagtcatgattctgatgaatatcatttgtgaaacaccagtgaacaaacatgacctcgcctttgccttcttcatctttctttccttgtgatttttaatttggaccatggtgggattttcaggcagcggatatatttcataatcctcttccacagcatcccacaaatccaaagactccatgtaggattgcattttcacttcacaaagatcataattctctccatcaaagattggaagagttatgtgggaaaaacttgcttcaccttccatggtagaggtcccgtaagaataaggctctcgataccaatggttggttttgaggaggaaattataaaaaacagaggagagaaaagagacaatacgtatgtgaaggaaatagaattattttattctaattcaaattattctcagcagcgatacaataaatagcaaaagatacactaattagataacaagatattaacaaaacataatattaaaactaacttgctccttaaaaataggaaccacttaaaactgccttactcctacaatataggaaatcaacttatttactaaatcttatctttaaaagctgaaaaaaaatattatacaattacaaaagtatatcataaacacatgttaatgcgagaatgataaaaagtatttaaaaaaaactcatataataaacttgctttaaaaatgtccttagcgtgcagagcatgggatatttgagtagtagtttttcttaaagtgtgggacattgcataatatataccagtgatcacgactcgcgaggttcacgctttgctcggtactataaaggaaagcatggggtctcttgtcatcttcataagaggaaagagtagaaacgtgaaccagaaccagaatggatcttcaacaacgaccactgaaacttcactttattccttacctgtcaccggggcatgtgatccctctctgcggcattgcaacactcttcgcctcacgcgggcagcacgtgacggtgatcaccactccctactacgcccaaatcctccgcaagtcaagcccctccctccaactccacgtcgttgactttcccgccaaagatgtgggccttcccgacggcgtcgaaatcaagtccgctgtcaccgacctcgctgacactgcaaagttctaccaagccgccatgctcctccgcagacccatctcccatttcatggaccagcacccacctgattgcatcgtcgccgacaccatgtattcctgggcggatgacgtggccaacaacctccgcatcccacgacttgccttcaacggataccccctcttctccggcgccgccatgaagtgcgtcatatcacaccccgaactccattccgacacgggccctttcgtcatccccgattttcctcaccgcgtcaccatgccctccagaccacccaagatggccaccgccttcatggatcatctcctcaaaatagagctcaagagccacggcctcatcgtgaacagcttcgccgagctggacggagaagagtgcatccagcactacgagaaaagcacgggtcacaaggcttggcatcttgggccagcttgtctggttggaaaaagggatcaagagaggggcgagaagagcgtggtgagccagaacgagtgtctcacttggctcgaccccaagccaactaactcggttgtctacgtatccttcggaagcgtctgtcattttccagataaacagctttacgagattgcatgtgcgttggaacagagtgggaagtcattcatatggattgttccagagaagaaagggaaggaatacgagaatgagagcgaggaggagaaggaaaaatggcttccaaaagggtttgaggagagaaacagggagaaggggatgattgttaaagggtgggccccgcagctcctcatcctggcccacccggctgtgggtggcttcctctcgcattgcggctggaactcctccttggaggccgtcaccgccggggttcccatgatcacgtggccggtcatggcggatcagttttacaacgagaaactcataactgaggtgcgggggattggggtggaggtgggtgccaccgagtggagactcgttggttatggggagagggagaagctggtcaccagagataccattgagactgccatcaaaaggttgatgggcggtggcgatgaagctcaaaacatcagacgccgctcggaagagcttgcggaaaaggctaaacaatcccttcaggaaggaggttcatcccacaacaggttaacgaccctcattgctgatctcatgcgcttgagggactctaagtcggccacctgatttcttgcgccatgcccctacaattataactcttccctagttataagaatatctattatgaattagtaaataaacagatttacttactaacttagtaagttcattttagtgcgttaagttgttgtaaactttttgttgagttgagaataaaggtgagtgaatttgatttgttcctatgaacctttgaaacatgtcccttattttatctatttattttctgtagttccccaaaatcgacttttgctaataatacactctcatcacatgttttgagaggctacattcaaataagccaaacccagtggcagttcaatgttatattttctcagtacactacgccttcttttgttctctaaaagttaggcaatcacacgtcttattaatgaaagaccctaacatgcatatgtgagtgtcaaacctgagagttaccattataggatactgggttcctgcataatacagaagtagcagaaatgaaggatcacacaaatcagagcctatgctcaagattctctacccagactacgtaaaaaactcctcataatttatctctacatccactcctttattctatcatttcctttaactaacttactgctagcttacccttcactcacccctaatctcattgcctactttctttttgcctagtgtagactctcctctccatattttgggcctttcataccttggcccatcagtaggctcatcctcatggtctctttaacatatttcttgttaacggatatatatttgttttgtagacacgcgtttcataccaaatatggagcctttgaaagttcggaaggtcttggatatgaaaaggcagtttcttacaaattgtaaaccattagatatttcttgctcttgttatgtagcctctcattttttatttgtgattctcctctaatgtaaaaccaaggatccaaaatcatgcaaaattttgaaacttttatatttattaataattaatagttcgggttttgggtggatggagtag

SEQ ID NO: 310 - DNA, 3428 bp, Glycine max
cgattatttcctaataattgctgtacttcacaagtcacattaatttgttgaccaacagtatctcgacccttaactatcagagcgttgtaaatattaggcatcttacctgggggaaaagctacatctagtaccggaccaattatttgggcgatacgtcccagattttttttttcaagcgcagaaacctcaggaccagaagtagtaggattgattcgcatataaaaatagattcaaattttttccggaaaatttttgaaatcaaaaagaaatgttcgataacaaagcaagttgatcggttaattcaataataaataagaaatgggagttagtactccatttttttgataccattcgaccaatccaattaaattgtttacttattcaatttcaataattgaattcttaagtttatcccagtcatttttaaaatttcaattggataaaatctttcgaaagttttttatttttttctatcattatagacaatatcatctatattctctatggaagtcgaacctgaaccttatttacaattctttttttttcaatatcatcagctttcgtatttcatcagtagacaatttatacttagcatatttttttacctactttttttcccgggagaagtctgcctatttttacatctaggatttacatatacaacatatatcactgtcaagattaagagtgaatttttggattatttagattagatatttcgattccaaaattaaaaaaagggataggagattaaaaattgaaaaaaaaaaaacaaaaattgggttgcgccatacatataaaagagtatacaataatgatgtatttgacaaatcaaataccatcgtttaataataacgaaccttggggattaattgataatattagtttattatttgggaaagattcctgtgaaatgaaagatttcattaactcctaagtcatgtcgagtagaccttgttgtttcgagaattcttaattcatgagttgtagggagggatttatgtcaccacaaacagagactaaagcaagtgttgggttcaaagctggtgttaaagattataaattgacttattatactcctgactatgaaaccaaagatactgatatcttggcagcattccgagtaactcctcaaccaggagttccgcctgaagaagcaggtgccgcggtagccgccgaatcttctactggtacatggacaactgtgtggaccgatgggcttaccagtcttgatcgttacaaagggcgatgctacggccttgaacctgttgctggggaagaaaatcaatatattgcttatgtagcttatcccttagacctttttgaagaaggttctgttactaacatgtttacttccattgtcggtaatgtatttgggttcaaggccctgcgtgctctacgtctggaggatttgcgaatccctactgcttatattaaaactttccaaggtccgcctcatggcatccaagttgagagagataaattgaacaagtatggtcgtcccctattaggatgtactattaaacctaaattggggttatccgctaagaattatggtagagctgtttatgaatgtcttcgtgggggacttgattttaccaaagatgatgaaaatgtgaattcccaaccatttatgcgttggagagaccgtttcttattttgtgccgaagccatttttaaatcacaggctgaaacaggtgaaatcaaagggcattacttgaatgcaactgcgggtacatgcgaagaaatgatgaaaagagctgtatttgccagagaattaggcgttcctatcgtaatgcatgattatttaacggggggattcactgcaaatactagcttggctcattattgccgagataatggtctacttcttcatatacaccgtgcaatgcatgcagttatcgacagacaaaagaatcatggtatgcactttcgtgtactagctaaagcattacgtttgtctggtggagatcatgttcacgccggtaccgtagtaggtaaacttgaaggggaaagagaaatcactttaggttttgttgatttactacgtgatgattttgttgaaaaagatcgaagtcgcggtatttatttcactcaggattgggtttctctaccaggtgttttgcctgtagcttcgggaggtattcacgtttggcatatgcctgctctgaccgagatctttggggatgattctgtactccaatttggcggaggaactttaggacacccttggggaaatgcaccaggtgctgtagctaatcgagtagctcttgaagcatgtgtgcaggctcgaaatgaaggacgcgatcttgctcgtgaaggtaatgaaattatccgtgaggctagcaaatggagtcctgaattagctgctgcttgtgaagtatggaaggagatcaaatttgaattcgaagcaatggatactttgtaagcagagaattaattgcaattaaactcggcccaatcttttcctaaaaggattgagccgaatacaatactacaaacaatactacaatacaaagatacttattatctaaagatacttattatatatatatatatatatttatatatatatatatattagtttttgttttgtattggaatagattggaatagaaaggtggtaagcagacgagattttacgaaaaaagttattccaatttctaagggaagttgctttatttttttctatttctatattaaatatattaaaattccatttttatatttatttatagatttcgattatagatttcgataatttatagatttcgatcattttttataagtttttagtttagaattcgaatagtttagaattcgaatctaataaaatttatatattaaaagaatttttgttataaataattataacaattataacttataacataataatagaatttctaatatttgaaatagaaaatatagtcttaatgaaatattaatatttcattactattagatttctattttaaattttctaatttatcatttttattttattcgtttgttttctcgattgtattctttttcaatactaatattgacaatagtgtatcaaataaatataatccgatcgtgagtaaattgatcaatttactcacgtgaaataggctttattacttcatcaaatggtaggttcattggattttctgcgatacaaccaataaattcttttttgattaaaaggtaagtaattcaattatatataataattatatataataatgtataacatagtagataaagaggtggtataccatttttttttagaattttttttttgttttatctgttcatttgtatgttgagaatcaattcgacttcaacattttgagtttttctatttttttgaatgtctgatattttattagacaattcaatcttttcattttattgtttttattgcgattggatatatacac

SEQ ID NO: 311 - DNA, 3182 bp, Glycine max
ccacttttgactaaaaaaagaaaatattttgagaaagataaaaaaaaactaatgaatttcaaaatttttctttggccaaaatatcgattagaagatttagcttgtataaatcgatattggtttaatacccataatggaagccgtttcagtatagtaaggatacatatgtatccgcgaatgaaaattcgttaatccaaatttgtcttctatttaccatatttatatggtaaatagaagacaaattaatatctatatctatctatatagatagatatagatacataacataaataaagacacgcattatggtatggcattgatactaattcactgatatataccttagataaaaaaagaatccacaaaattatgttttttttaagtataccattttttatggtgaatctataaaaaaagtctcctttatatctatttaaattgcatggattccattttttttatttataagaattaattcgattgtaaaaaaatcaagaattcttaagtaaattaagtaaattcagatttatataaaaaattcaaaattagtgtcattactattactgatcaatcaaaatatctatcaaaagtaaaaagcgaagagaagggaaaaactttaatttttttatggtaaaaaattcaattatacctgttatttcacaagaaaaaaaagaaaaaaacccaggatcggttgaatttcaaatattcaaatttaccgatagaatacgaagacttacttcacattttgaattgcaccgaaaagactatttatctcaaagaggtttacgtaaaattttgggaaaacgacaaagattgctgtcttatttgtcaaagaaagatagaatacggtataaaaaattaataaatcagtttgatattcgagagtcacaaattcgttaaattgaagagtaattctcaattattcgatttattagatcttgaattttgatgaacttttttttttaagcgattcataaaaaaataaatcgaggaaaaacctatgaatatctcaactacaagaaaggacttcatgatagtcaatatggggcctcaccacccatcaatgcatggtgttcttagacttattgttactctagacggtgaggatgttattgattgtgaacctatattgggttatttacacagaggaatggaaaaaatagcggaaaaccgaacaattatacaatatttgccttatgtaacacgttgggactatttagctactatgttcacagaagcaataactgtaaatggaccagaacagttgggaaatattcaagtacctaaaagagccagttatatccgagtaataatgttggagttaagtcgtatagcttctcacctactatggctaggaccttttatggcagatattggtgcacaaacccccttcttctatattttcagagaaagagaattaatatatgatctatttgaagctgcgacgggtatgagaatgatgcataatttttttcgtatcgggggggtagcgactgatctaccttatggttgggtagataaatgttatgatttctgcgattattttttaacaagaattgttgaatatcaaaaacttattacgcgaaatccgatttttttagaacgggttgagggggtaggtgtagttgatataaaggaagtaataaattggggtttatcaggacccatgcttcgggcttccggaatacaatgggatctccgtaaagtggataattatgaatgttacgaagaatttgattgggaagttcaatggcaaaaagaaggagattccttagctcgttatttagttcgaattggtgaaatgatggaatccataaaaattattcaacaggctttggaaggaattcccggcggaccatatgaaaatttagaaattcgctgctttgatagagaaaaagagccagaatggaatgagtttgagtatcgatttattagtaaaaaaccgtctccgacttttgaattgccaaaacaagaactttatgtaagaattgaagcccccaagggagaattgggaatttttctaataggggatcaaaatggttttccctggagatggaaaattcgtccgccaggttttatcaatttgcaaattcttcctcaattagttaaaagaatgaaattggccgatattatgacaatactaggtagcatagatattattatgggagaagttgatcgttgaaatgataatttatttaacagagatacaagatatccatttttttttcagattggaatcttttaaagagatatatggaattatatgggtatttgcccctattttgattcttatattgggaattacgataagtgtactagcaattgtatggttagaaagggaaatatccgcagggatacaacaacgtattggacctgaatacacaggtccttttggagttcttcaagctctagcagacggaacaaaattacttttcaaagagaatcttattccatctagaggagatattcgtttattcagtataggaccatctatatcagtcatatcgattataataagctattcagtaattccttttggctataactttgttttatctgatctgaatattggtgtttttttatggattgctatttcgagtattgctcccattggacttcttatgtcaggatatgggtcaaataataaatattcctttttgggtggtctacgagcagctgctcaatcgattagttatgaaataccattaactctatgtgtgttatcaatatctctacgtgcgattcgttgagacagaaattttttgatactatttgctatacccctctctttatagtactttgtagtaaagtaggaaaataaattgaatatatatctattgaatttattttttttattatttttcgcattcggattgaagaatttaatcagatagttatatgagtgcaataaaacagcttcttttgaatataatttatagaatactatattacttatagttaatagaaaagatgatgattttaaattgcagtaaaaatattgagtctcattttctatgtataagaattaagtgaaaaaaatgaattaaattataggtagaagttgttgtttttcccaaggttggttgattagtcatcctgtcttgaagcgggcgtaaaagaccaaccctttttaaattaaattttcaatatcatttgtatgaattagcatatatatattaaca

SEQ ID NO: 312 - DNA, 3173 bp, Glycine max
gagttctttcgaatttctcgtatcgtttttcgtggattagcatctcgaggtcctttgatgggcataaagaaatcgtcttggtagcaaccgccaaaccaatagaacaagggttagctctgcagctggtccacaagcaaggtaagtaggtccattaccggccggctccggaccgaaaagacctaacggagtaatcccttatctcggatcggagatgctatgctaacggggctggaatcgaagtgggggacctatctaccgcctgtgtctatctcctgtcaagtatgctccccagacatagactacgtacagggtagtactcttggatataatatcaccgcgtgaacgtgaacataacattaagttacgaatgtaactcccgagggatcgaccactattctaatctaaataaagtcaggcggagaactgttgttcattggagcgccggagtgcggaggttgttcccatcatggaagtcagagtgtgggactgagccttccgaatgataaagaaaaaaagtgcttagtttcgttggaaaaaccaacgcaaataaatatcatatttactttatctcgcccaacttctaaggatagatagaaaaggttggagagagtgactttctgaaaatctctcctttctaaagctgcgcaaggcggccccacccctcttttcccccctttaatgaaagaccctcgcccgccccgcttcctattcatttttgggtcgggacccgagggccttttttttctcaagaggtgatttcgagaatcaaccaaccgacaaatccgtagcccaggtgactcacagcctccctctcgcccaaataaaatgggatgaattaaaaaaaagaagctttttgattgattcagggcgcagcgaaaccaaattctttcaaggcaaaaggggggcttacttacaataatggattcttttttttaagtagggccccagaacgaaaaaaaggtgggggaaccagagttgtcacgataggaaagagaaaaaaatgaggaaccaacgattctctcttcttaaagaacctatatcctccacacttaatcaacatttgatagattatccaaccccgagcaatcttagttattggtggggcttcggttcgttagctggtatttgtttagtcattcagatagtgactggcgtttttttagctatgcattacacacctcatgtggatctagctttcaacagcgtagaacacgttatgagagatgttgaggggggctggttgctccgttatatgcatgctaatggggcaagtatgtttctcattgtggttcaccttcatatttttcgtggtctatatcatgcgagttatagcagtcctagggaatttgttcggtgtctcggagttgtaatcttcctattaatgattgtgacagcttttacaggatacgtactaccttggggtcagatgagcttttggggagctacagtaattacaagcttagctagcgccatacctgtagtaggagataccatagtgacttggctttggggtggtttctccgtggacaatgccaccttaaatcgtttttttagtcttcatcatttactcccctttcttttagtaggcgccagtcttcttcatctggccgcattgcatcaatatggatcaaataatccattgggtgtacattcagagatggatcaaatttctttttacccttatttttatgtaaaggatctagtaggttgggtagcttttgctatctttttttccatttggattttttatgctcctaatgttttgggccatcccgacaattatatacctgctaatccgatgcccaccccgcctcatattgtgccggaatggtatttcctaccgatccatgccattcttcgtagtatacctgacaaatcgggaggtgtagccgcaatagcaccagtttttatatgtctgttggctttacctttttttaaaagtatgtacgtgcgtagttcaagttttcgccctattcaccaaggaatattttggttgcttttggcggatcgcttactactaggttggatcggatgtcaacctgtggaggcaccttttgttactattggacaaattcctccttttgttttcttcttgttctttgccataacgcccattccgggacgagttggaagaggaattccgaattcttacacggatgagactgatcagtgaaaaattctgacaccaatcatttacgtattacaccaagaattaattgacaagcgcattagttttatagttggctatgttgatatagcttagaaaagggaaaagagagtgacagaactgaaaaaatgacctaaacacccttaataatccatagggaataaatagggacgttagtcccctctccatgaaacaatacaatccgtttgcctgtcttggttgatttcgcatatctctttcttgttcttcggcaagctgctcttgctcaagtggaatcagttgcagttggcatatataaataagtagaagatcctgtcttcttttatttaggaatttaaagagaggaatccactggccttagctcatctagccgtagctcattgggcagattgctttgaatagcaaaatagtaaagatcagagtcgacattctttcacaaaacccatgaaaaaaaaaacagataacagcactttaaaacagagcaattcaataaatatcaaataatcaacatattccattgcaaaaaaacactatgagcttcatactcgaatccctcaccatccgttaacaatcgcagcttcttcaactggagctattcttgtgacaactgaaggaaattcgagtcaggccttttaagccccggaaagaccactctcttcctttaatacatttgtaaattgcccttgataatgaaaagagcggattcaatagcatcggcgagagagagaattcctattgagttagctttcctggggaagaggatattttcttctaaaaaggctataccacgaccaccaaagccagaagagaagacatcattcaaaaaaaaggtcgaaggacgaagaagagctccaagcaagagagattcttctctaaaagcagctaccaggtgagaataaacaactaccatttaagcagctgacagctacacggattcaccactacttatgacttcttactcctgctcctagacaaactaagaagcaaggaaagaggaactatataa

SEQ ID NO: 313 - DNA, 2660 bp, Glycine max
accatcctgcgacgatatgggccgcaatcacaggcaaactaggttgcacgtgtgagggtgctggcaagcgtcgtatattcgcaataggaaactatgtgagaggttgctgaaacccatccaccattggtttgcggaggtcctccgccgcatcccaatggatgatcaaacagcacctctcattcgtttagttcctagtaaaacatgtttaagctatgacctcaagagtgctaccgattggtggcctcttgtgtttctgtttgaaaggcttgcgctattgtttgacaggtcatttgcttcaagtgttgtgaatacaacattagggacgaatgtatttgaggtacccttcgttaagagggctctgtctcaagtgtcctttgtgaccggtcaaccgttaggctattatggttattggcctttgttcgcgttcacccatcatgttttggtgtggtgggctgcggaacaggttagacctgggatcctgttcgacaggtatgctatattaggtgatgatgttctcatcaccgatccacttgtggcggaacagtaccggctaggcttacaacggcttggtgttaagatatccacacacaagtctttgatatcctcaactggtgctgtagagtttgccaaacaatttctggtcaaggatatgagggttaacctctctcctgtgtccatgaaagctttatgtggcttccaccacccccacggatactacttctaatagatttgcctacgctatcatggtcatggatttggagatagaaagctattccaactccgagattgctgactggattttacacataaggagcaaccccagcctactctcctccttctacgctcctctgagggggcctctctgagatatacggtttatgccgccatgctttctttctgttggtcaacaaccaaccacatctctatatagtcaaaacactagtcctacaggcttgacggagttcagtctgtctggagggaatcatttcttctcaatgccatgatactttctgttttgtcgagccctgctttggtctctggtttgatggttgcacgtgctaaaaatccggtacattccgttttgtttcccatcccagtctttcgcgacacttcaggtttacttcttttgttaggtctcgacttctccgctatgatcttcccagtagttcatataggagctatagccgtatcattcctattcgttgttatgatgttccatattcaaatagcggagattcacgaagaagtattgcgctatttaccagtgagtggtattattggactgatcctttggtgggaaatgttcttcattttagataatgaaaccattccattactaccaacccaaagaaatactacctctcttagatatacggtttatgccggaaaggtacgaagttggactaatttggaaacattgggcaatttactttatacctactatttcgtctggtttttggttcctagtctaattttattagttgccatgattggggctatagtacttactatgcataggactactgaggtaaaaagacaggatgttttccgactaaatgctattgattttaggaggactataatgaggaggacgacagaccactcacgatcgactaaaaggaaagtcgcccggagatattggttcaaatccaattcgtgagaagaatccaagtgagataggcctatatgctggaggctctatcatacatcaattataagttcaagacgggcatccccattcgttcccttcccaactatagctgaacttggtaaccaaactctttcccggcaagaagatccaatccttcgggcaagtgagatactaataaagtaaagtataaagggcttttgcaagaatagtcatagggctcattctttcactttaaactgacacaaatttcctatcccggcagctttctcgtaaaatgaaattagggcagaatccgttttacagttaagatgaggagttcatagcccatagccaagggacaagagtagcgacccctaggcagtaatcgaaacgatacgagcgggacaggggagctaatgcgatgcggtcgatagttagttctggaaggcatagtatccggacgagtgttagttcttgacataaaagatagtcttttactttagatgaatattatgagcataccctactttcagcctactgaattcctaggatattttcaacctaaataataatattttttaactattcgaagtgttgtaatcaaaagcttttgatagctcgatatgtatagatatagctagagcgaccacccatgcgagcataataagacgccttggaagggcagggcctaaacttctggctaaagttagccactagaaatcgattccttggctccgggaatagaagacttcaactttactggcataaaagcagattgagtctaagactaaggcgtgcgtaccacttacagcactaagaacaccgactacggatccggatcacttccagggactgaaggaggattactatttttactgacacctccggtaaaggaagaagagcgattgactctactgacaagatgggtggattccctacattagccagccgcttagatactaaaccctactagccaattgcaaccctagctgccaaagacttgcgaatactcatgttattttattttgta

SEQ ID NO: 314 - DNA, 4944 bp, Glycine max
ataagcacaacatcctctacaccacccttgttgagctttcaaaggcgttggatttgcataattgtgcagtttggatgccgaacgaggaccgacgagagatgcacttgactcacgagttgaaaaccaactctgccaagaattttcagaattctattccggtgaacgaccctgatgtgttggagataagaaagaccaaaggggtgaagattctggggcccgagtctgctctaggagctgcgagtagtggtggctctgtggagttgggtgctgtggcggctattcgcatgccgttacttcatgtgtcaaatttcaaaggagggacgccggagttggttgagacgtgttatgctatacttgttttggttctgccaagttcaagcactagggtttggacctaccatgagatggagatagttgaagtggttgctgatcaggtggctgttgccctgtctcatgcatctgttcttgaagagtctcagctgatgagacagaagctggaagagcggaaccgagcactgcaacaggctaaaaagaatgcaatgatggccagccaggcacggaagtcgtttcagaaggtgatgagccatggaatgcggaggcctatgcattctgttctggggatgctgtcattgtttcaagaggataatttgaggtctgagcagaagattattggtgatacaatgttgaaagttggacatgtgctctccagtttgattaatgatgtaatggagatttcagaaaatgaaaagggaggcttccggttagagatgaaacctttccttctgcattcaatggtgagggaagctgcttccattgccaagtgcttgtgtgtttatgaaggctttggttttgaaattgatgtccagaagtctttgcctgaaacagttatgggtgatgaggcaaggacttttcaagtaattttacacatgattggctatttattgaacatgaatgacaaagggactctcaattttcgagtttttcttgaaagcgatggtggagacagggatgataaaaatattggaatatggaggtcaagcaatcaaaatgaatatgtacatataaaatttgattttcagattactgagagttctcagtcagatgaagcaatttcaacaatacattatactggtaggaggcagtactacaacaatgaacctaaggggggcctgagcttcagcatgtgcaaaaagttggtacaggtagatgcatcattatctatatctaatttatgtaccatcatctatttgattatagtcagatgtataatttccctgttaactttttagctgtaacttataaaggacacattccccatcctctagtgaatttatgtggtcatccattaactgtataaattgttagcagttagctttagagcttagaattgtattggttaaattaaactaatcatttagtccttattggtgacactcgtttatgaatcagttcctgtatgaaaaaaattgaagttatagtccacttacactcatattacttattggtacacattggcccctacttttactatatttcttaagttttagtccctatgtgcccttatagggactaaaacttaaggtttttgcatacaagaattgattcttaagtgagtgtcacctataaggaccaaatggtttgtttaactcactacattttatgcttaaagaatgatgtttggtttgacaaatttgcttgctgacctgaattttcagaattatccaatgtagaattgtttatgatgttggaaatgggtggtgaaactatcataataagttagattgggtgatattgctgacagatcagatttaataatacttaggaagctttctatttagtcaatgcctcaacaattcttgtgcttggttatgttctaaccaatatgcatattatcatggttgctattgttacaaaacacaattttgctttgaaagtttgcttgcctcttgtcagattctgcttttagctctaatggggggaaataattctggggatatcaagttgaattccagttctaaaacggctattgacatctgctgtttcacttcaatgattttttgtgtctatacaactcttatttttctagagatgaatttgagattcgatgcataaatcttgaacccagaagaaataaaatatcacacaaccttttcaccttctacatgcctcaaaatttttggttatcaccttagcatttggaagttatatatagagcatggtgctcagtagtggaatcattgttccttgcttttcatgtttgcattaagctaaatttggctcatatgttactgaataatagtggcaccctaggatgctcaaaggggatgttctactccaaattgaccacgcactgatctatcacttatgctgccatttttttcattaaaattttatgaattaatatgataacttcaactttagcgaaagtattttttaattttgtttcttccaacaattcattaggaaagtgtaattatgggcaaatctgttaatacaaaatagctgattacttatatttgacacaattttgcatagatttctctccttacgggtttcatctaagagctgacatgctgtttctgtcataatctaactcaagtcatgatgtccttggcttaacatatcgttgcagagaagctattttcccctgtattggaaagatccttttgtgtttacctcacatatatgtaaacatcatttatccttctttgggagcttatcctagataactctgaaaatacggattccagcaggctgacaacacaggcatcacaggaaacatggagattatattagcagaaataaattgcaatgattaccattttatttttatttgtaaaatcatccaattagttatagaattttcctaccataaactagactagaaaaaattctttatttctttcatcagttggattaggcgaccaataagaaagttcatgcattttggggttaagtgggtgaatagctctagcaaatgctgaagtgttttgccgcaaacccaaatttctttctctgaacttgcctatctgctaatttgttcagcaaatgaaccttatgtaatgttttttaattgatcattatatgattgtttttgtaactctgactttacaatgtggaataatatgcagatgatgcaaggtaatatatggatatcaccgaactcccttggtttggtgcatggcatgacacttcttctcaagtttcagataggaccatcacttgaaaaatccatatttgcacctaaagattattcaagctcacagttcagaggccttaaggttgtgttagccgaggacgatggtgtaaacaggaccgtgaccaagaagctacttgagaagcttggttgtcaagtaattgctgtttcatcagggtttgagtgcctgagtgctgtaagtggtgctggtaactcattcagaattatcctgttggatcttcacatgcccgaaatggatggctttgaattggcaaagagaatccggaagttccatagccgtagttggcccttgattatagctcttataacaagtgcagaagaacatgtgagggagaaatgcctacttgcaggaatgaatggattgatccaaaaacctatcgtacttcatcagatagcagatgaacttagaacagtcctacaaagagcaggtgaaaaactgtgagaacagttttaaaagcatgcttcggtttaagaaaatatgatttcattagtaattacaaaaaggtcatgttattttagttctgtttcctattttcaagcattgcgggctatgcttttattattttgtgaacaaattcttgaaaataagaaacaaaataaaataatgtgtcttttataattactaatgaaagagtgactcaattttctgaagttgctcaaaacggcattgtgaacttgggggatttctaacaatatcaaataataaaaaaagtagccttttgtccaaccatatgttatggctttatacgttactacttgcctccatccaactccaaccgagagagacgatattaggagatgaatcaaaatacgggttcatcacttgatcttgagtgtttggaaaattttcgatcaaattagttttggctattgttaatctattattgcaatgtcaatcaagtggccctgcaatgactaatcatttagcaaagttgacttatatttcgcaataatatcaccatgattttgccacataaagtaaactaaataattttaaatcttttttatctttaaaatataccaattaaaatatcatattatataaaaaaatttcttctaatcccaaccttttatcttacaaatttcttctaatctctgaatcttacaaatcgttttataatctgaatttgtcttaaatattcaactatttatcaaagaatctaactatataatatgtgaatttgattgttatggataaaaaaatctcaattatttgaaaataaaataatgatttgatgacaaatttccaactttaaaaatctatgattaattcttaacttaaaaaaatcatttagttaagatcattttgtaaacaaattaaattgaacgaagtcacccagagaatttttatttcttaactttaaaaatctttcacctaatacagaagacgaggttgccgaacccattaattaacaaggaaatattagtattttaaaaaaaaaatcaactacaactaattaagcttaatttttgaacgccgaattatacgcatcagtgtgtcggtgtccaactaatttgatgattcaattccaattaaactcttaagaacgaatccggagggagcgactaaacgaagattgatgcgagtgggggacgaaactctgctacaggtgaagaaaatgaaaaaagattcagaaaatttctaactaaatcaaaacaaagccaatttgatttgtgtgttgtaactgcgtttgttcgatttatgtgtcgtgcgaaagaaatccaaa

SEQ ID NO: 315 - DNA, 7760 bp, Glycine max
gttctgctttttttgttttcaaacttttgtttaggaaagtttgtgcagaaaacaggtaagtttgattgtatccaaagccaccaagaaagacccgtgtagccaccaagaaagacccgtgtagccaccaagaaagaccgccctgtcatacattaatagttatgacctattgacaaaacaataaattttgttgaagcatttgccctcaatgacttcgacaattcttaatagttatgacctattgacaaaacaataaatttggaatcatacttaaaacatgaaaattactgcactttttttacaaaggttacatcgagcaaaactatctcaattgaaagttaaaaaaataacttagtgtttgataaaattaactgtttaaataattaaaaaaaataataccataatttatttaaaaaatataacaaaaaaattaataaatatatcaaaaataaaagtgaaaaaaatataaaaaattaaaaattagaaactaaagttttaaaaaaatactaaaaaaatatatttatcaaataaataaataaattgtttagataataaaaataattaaaaattaattaaaatatcttatgaaacttgatcattaaataagactcactgaattaatctaaatatctaattcaaaccaaatgaaataagtctaaaagcaacggtggtttaatatatatctaattcaaaccaaatgaaataagtctaaaagcaacggaggtttaacatataataaagaagaaagatgagatacgtcatgaattgtggtttaatatatacgtgaacatgcatgtgcgcccatgatcagccatcacagacgagacaaaggaattgtttattttacggaaagttgagtcctagtcaattttgcggtggtgtataaattcatagatgaatcacatcacatatattgtatcgagtctagtctctacaatcactccttcctctcatcctctataaagaaagtgcttaatttgtgttgttacttggttcagtttccatggattgggggcttgctatatcttctcatcctaaaccttattcagtcacaactggtacctatgtgtcctactttcttcttcgatatcatgcatccatagcttgggtatttactgactaatgttggtgattgtaggtggaaatctctggcggagtaaacacaccaccaagaatatttactttgcaagtatgtatcacatatactcctgttcctttaattttgaccgttatcattacttcttaaatatctcagtcttttacattcgttcacttgctcacagaaatatatattagtagaaggaatcacttttaaagctgtgagtttttcaataaggaggggtgtttaaaataaaatgatccaaaataaaaataaaaaaacacttaaaaaattaaaaatcaaaccaaactgatttctttttatttatttggataattttttttcctcaaatcgattggtttggtttggtttatagtttttgaaatcgaatcaaatcataacacttatgctaacacttatattattttagtattatgtatgtacaatttaggttttataatattttgtagtgcatgtatcccaagtttatacaatgtatatcactttttttttataatatgttttgttaaagtttgatttgaatgattttttgatgaaaaatggaaccaaaatgagccatgaacacccttatcaataagtacttgcaagacaatgaaaataaaaaagtcaacattttaaaaaataaacttttcaaagaaaaatcatttttttcaaatacaaacaatagtattttcatatctagagttgacaaaatggatgaactgacccaaccgtgtccactagattagacctaatggcctaccaatactctacctggatcatattttttaaagtcgagttagatttaatgaccgtcatgttaattcattttagcccattttatttttttgtctaaatgactagcaaaatgaacggaccaatccaacccaatccatcagatcaagtgtgaaaaatgggttaggtcgagcctacccatactttatgttgatcttatattttaaagttcaattaggtctagaggaccatcagcttgattcatattaactcattttatttttttgtatgaatttatataaattcaaaagaaaaaataaaagttaaaaaacattggaccaaaataagtttgactgaattggaacccatgttttttgagtccaacctagtccaatgggtcaatccaaataggtacaattttatttgggtcaatattttttcagttcaattcaacggactagcttgacaagcttggttcattttatcatctctcttaaaaaataaaaactatatatatatatatatatatataaaagaaaaattagacccatcaagccaaaaagaaattcttaaaaaattgttccatttagctaaaaaaaactagctaattttcttttaattatctatatttttcaaaatacaaaataatgtaataaaaaatagaaaaaaaaatcaaattcaatttatttttcttattaagtgggtaaaataaatacatccaaagttgttagatcttgagtgattaattagagacattttataaagaacatcatacactattaatatatttttctatgtgtaaatgactcttgaaccttactctatttttgaaaactttttttaaatcaacggttttttttatgttttctttaataaaataaaataaaggtgaattctcttattttagtttgtaattgatattttttagttgtgcatggttactattactacatccaatatttggtattttaggttcttggatatcaaaagcttcacgacacaaaagggaaactcaaatagaacataatgttttgaggttccaacaaccaagtttggatcatcattacaaatgcatcagaggagggtctacatatcaagaatgcaatagaaaatttgttgtgaaggcaatctctaaacaacctcttggttttgaagctcatgcttccaatcctaagaacattttggactctgtcaaaaatgtattgtctgctttctactggttttcctatccatacacaatgattggcatagtaagtcaaacttcttttatattactctcataaataatctccaaatgttatagtcaatacttaattcaattcatttgtatcaaacactttttttggataataataacatctttaatgtttaaatgggccatttttatttgtctttggacagacattatgcgcattttcttcatctcttctcgcggtggaaaaattatcagatatatctttatcatttttaattggcgtgttacaggtgagactctaaatgtgttattttcctttaaatagctaattgtaggttatctttaaaattcattaacattgagttttaaaaatgtttcagggtgtgctgcctcaattgtttattgaaatttatctttgtggtgtgaatcaactgtatgaccttgaaatagacaaggtatgagacttactattagaaataaataatctaaatgaataataaattgcttttctttatatcttttgggcttatgtattatttcgttaaaaatatgataaccaaattccatgtggtattttggttgatgaagtctgactaattattatagcccttgatatggtcgaaaaaacatgcaactttttatagcttaacaaacttttggggtggaaaagtaccgtatgatttgtcttatttctaatttatgttacatgttttttgcagataaacaaaccacatcttccaatggcatctggacaattttcctttaaaaccggtgtcattatttctgcagcatttttagctctggtgcctttaagaattttccttttctacaatgttttttttaacatgaacttcgttaacagagtatgaggggacttattgttttatttttatttttcttcagagttttggatttacttggattaccggctcttggccattgatttgtaatcttgtagtaatcgcttcatcgtggacggcttattcaatcgatgtgagtttttttcatttgcatatagacttttttttttcctttacaatagttaagacgtgagtataagactgttaatagtatatccataatagtagctagattaggaagatgaattaaaaaataagttttttttttaaataaaaattatagtgaactcttatggatcaaaatcaatccaagataatttttttcatatttgatttttaaatttaataaaaagttttaaaataacttcttatatattaatttatgacttcttcaaaatagtttattttttataaaaaaatatttttaaaaactatattacaaaataagataggttgagaattaaattatttcctagaagttgattctcaagagcaaacatttttaaaatatcctccaaaagagtgaaaattcaaatcctttagttaaaatttgtcttctaaaatgctttatattttcaaacatccttgatttgaaatccaaagtatatattttatgccaaaacatttaaaatccatttgaaaaaatacattccctcattaaaattcatctcaagtacaaattaagctattgaacgaagatatttctaacaaacacgctaatagaaactaatgtcaaaatatttcatttaagggtgtttcgatgttttgaaaattttcaggtgcccctactgagatggaagagatacccatttgtcgcagcaatgtgcatgatttctacttgggctcttgcattgccaatttcatatttccatcacatgcaggttgttctatagctaattaattgtgttttttataaacgtaagttatggacgagcatgaattaacttatatgcacataacaataatatcaaatttttatcccaggttgttagggttggttttgttgagttcatgattatttattagaacttaattaattatgagatgtgaataagaaagttgaagaaaaactagatatgtaaagaaaaaaataagcctcattttaattgctttagtataatatgtacatttatattgaaagctaactttgtcaactatggctatctcacttgaataataaatagcctgaaactaactaattatcaataagctacaaacttttatatatataagttacaagctaccacctaagatcttcttccatgttattaatatattatcgccatgtagtcctagaagttttatattctcttagtaccttccacatgtaagaaagatgaaaggaagctaggtattttttttattgctaacacatgtaacgttgtccagaccgttgtgttgaagaggccaattggctttccaagatcattgggttttcttgttgcattcatgaccttctactccttgggtttggcattgtccaaggtaaaagctagcctatagtttcgcaaaacacacctttcttctttccaccatcaaagttttccattcaacatgtatatataatgtaaaaccttttattggatttatataggatatacctgacgttgaaggagataaagagcacggcattgattcttttgcagtacgtctaggtcagaaacgggtatgtttttcaaatcaaacatctcagcaaaattggttgtggcatattgtatatcccttagttgttattaactattttttttccaggcattttggatttgcgtttccttttttgaaatggctttcggagttggtatcctggccggagcatcatgctcacacttttggactaaaattttcacggtaatatgttgtttattatatgtatagttacaattataggtgtgctgtgtcttttttccctttaagaagttatttgttttgaacaacatggtgtgattttgattagcaagtgttagaatatattacaaaattcttataattttttagttgtaacttaagtaatttatagtgacttatattatctcttaggattgattttctgaccttagtaattaggattatgggtctattattaattatcaatataatatatattagtgtttttatcttcggtgatacatttttcacatcaatattgatataattttattatcataagtattccgttttaaaaaaatgatcttatcagtagtcaaattaaagggtaaaaaatgatctttaaataaagcgtacattttacatatggatatatgaggatataaacttgtgtaaacttttcaacaaaggttgaaacttatgtggtgccactgttttagggtatgggaaatgctgttcttgcttcaattctctggtaccaagccaagtccgtagatttgagcgacaaagcttccactggatctttctatatgttcatctggaaggtaatactcttaaagattgtttgtcatctaaggaggttaatatcaagatttatatttaagagaaatagctatccaaatactctttctcttttaagaaataaagttgtgtgacgatttctattgtcttcagacttctaattgagttgcaaaacacaggagtaaattagctaaattaaagttgttttttgtgaacatgaatttctgtgattgagattatgcacttaatcatatttcgatgtgatttcattttcttgtgaaaagtgcaaaacatattgagacattaattattgcctgcttatttgtatattatttgttttcaaattatttgcactaaattctttgtctttgttgatacaaagttgaatataataattatgtattgatttattgtgtctttttgcagctattgtatgcagggttctttctcatggcattaattagatgaggatatcgtggaaggcttaaacaatgttctcgacacatacaccaaaataaaaggaatatatgttttgcatctaagatttattaaataaagccgaatgttggttcttgtatcattaagattttttttttaattgtcgaagactttatgtattcatattcaccttgacttctacggtcaaatttttcataagtggaataaaagcaacttgttatacaagttttttttttttttgaatttagtgctttaagaaagaaaataataatagtaaaaatgtttctttttagtgcacggtgccctttaatgcaaaactttcaaatttaaagttaaaacattattgtcaaataagaatcactaagcatatttcccacaaaattaaattttcatttcattttatattatctgaatatattaccaacacttgcttttcaagtttgaaaattttatattatcactttttggtgccaatttgatataattctttttttgctaactcaattcatatctcccataatgttattttttaatagtatattaatattattattttataaatatttatgtagaatatagatatattaatattattactagtaaatattattataatcccacaagaagaattgcaattttaagaaaattaataaaaaatattataacaatttttaatcgttattatattaaattaatttttaaaaatataaaacactaaaaactttaatattaaagtgactaaaggaatattttgagccaattcacaaatataaaagaattagaatgaaaaattttaaacataaaaactaaaataaaaaaagcaaaaaaaaaaaaaaacagaaggccaaaaaaacatgtcaagatattagttcccaacaaactaaattctcaatggcgtaaagccataggaaaaatattaatttgttaaaattcattttttataattatggtataaaaaattattatcatgattttattatatatatatatatgtacatatgtgtgtgtg

SEQ ID NO: 316 - DNA, 11758 bp, Glycine max
tttgtacaggcaacttattaaaactaaactccttttataataaataattatttatattctacttagtgtttatagttattaaaataaaaaaaaattattcgtggaggtctaggaaatccgaattagtgatgttgaattacctaatataatgaccttaactaaatccataaataaaacaaatatatatacttttaaccatttcattttttgtggctaaatgtgactatcatccataagttggaatagaattatacaaaaaaatatatatacactttgaaaaactatattatattaaaaatttaaattaggaaaatgcaagcagacacgaaaactggttaagaaaataaaatagaaaactttattaaaattatacaaaaaaaaaatcctttctgtttcagataattcttgattttagtaaataaaaaagaacaaatagtaaccaataatcttaaaatattattaaaaaatgtgttgttaatacacccttaacataattttgaatatattcttccgcgttggttcatgagtccagatagcgtgaacgcgaaacacgcgttgcacgtgctacgttgcgtaagcatgctcatgctgttccccactttaatattgctaaaatttacagcaaattaaagtatgtacgtagatattcaattaaaattgagcaaatcaataatgtattccacatttccgctactaaatgctactccgtatcacatcaaggagcaaactatttaatgttttattttttataactctcaatgctataactaaaattatgtttgcttggagtataattttcgtggaaaatgctaaaaaattgtcaatgaaatggttataggtcttttaacataattattgtagataattgttgtaacagatagtaaacttattatatatcataatttatgattaaatgataatataatttttttatatataaatcatttactctttaaaattttcaatcaaaaataaaaatcggagtgagatgatgcagaccatgcatattggaactcctacacgcacgtccccaacttctgagtcaccaattcttaaaatggacgatgcccacaaggccacaacgttcatgacattaatgaggatcgatatggcatctcaccattttgataattttttttttgtatttttttacttttttatggtacattttttataggtacagtatattattttacatattattaatatttttttagtactatcatttaaatatataattttgaacttttttttttcatttctatgatatatgattgctaataggttcatcacagatcaatatcattcttttgcgtttgtattattaatgtcttattagaagaaaaggacatatttataaaatggtatattttcatttcaaagatatcattgtgtttgtactattaatgttttattacaagaaaaagacgtgtttaaatggtatattatcatttcaaatatttctttttcaacatgaagtcatattttacacagaaattcatcatatattttacactttgaataatggccgttcagaaaattgaatagcgacaaattttagtatatgttaaatccttggtcaattttgaaacgttaattgaaagcataatacacaatttttcgcttccatttacggcatctaaacaaactacatttttcagaataatgctcagttctataaaacgataaaatgcatacacactaatgcaactgttttgtgggaaataacttttcatcttcaactatttttctatggtttgtactgttaaaatttggtgattgagcagcttaaaaagcacttcgtaatccaatttccaacaagcagtatgccactatgttatacacacacacacaaaaacaaaaaaaaaactacgttgaaattaactttagctacagattaaagagagcagacgacagacaaaatagaactaattttatatattaatctcgaccacttggttgttgagtagattttttatttttttttatctgattgagtagataatctcgtatatcattgttttgatttttgaaaacgattcactctgtctctgttgaatgtattgataagtcctgtggttaattaggatgcttggtattgttgtgtaagtagagtaagtgtaaaggaaaagaaaggtcgaagtctgagtattagtattacgaaatgtgtatttgtcatgcaatttctgcaaatataatgcagcttaggtttaggatcatacggggaacagaaaaaaggggtgacaataattgatgtacttgtataaaacaaacatcttcttgatttgatttattcattatgtttttatgctcaatgaatctctagggatatgtgtaaacaaagtcacattcttcctatgtgacgtgattttttttaagaagcctttaaagtgtacttttaatctgcattattattcggccaccctgtgaactgcactgactttaattaataacagtgaattttaactaatgcagtaaaataaaaataaaaacacgtattatattagattatttttacatcatctagtatcgtataaaattatttgttctaaagaaaaagagtaaagaactcttttattcctcaatatataaataattcgcaatctaatatatgaaaaataaaaaattctgatttaattctttaatgtctaaaatgtgcgataataccttttgtcatatgttaatatcaaattgatttatgaaatttagaatttaacttcaaattgattatttaacattataatttaatattaaaataatcttataaaacttaataactaatatgaaactgttctaatttttgtatatttaagaactaattcaatatttttcatgttttaaagactaaattaccaataatttatgaatccggagatcaaaatggtcattaactttaaaaagtattccctaccttttgttataaagacaccttggattagcttaaaagaagtaataataagtcaatatgatactaataaataaaagcaaataaaaataaaaataaacatcaatataaaagataaggtattattatattttatatcttttggcatgctttattatatgtaatatgtttagtaattgaagatcttgattttctttagtaaatattacaaattaaaattggtttatttttacttgtgaaattgtaatatataattgatcatgaaaaaatattggtcttgatagaaaaaaaaacatgagacaaagtttacgcttaatttttgtttatagaaataacgaacactagaagtgaaaattgttatctttagaattcaatagacaattgtttggttttgtggtgaactttcaaaaagcgtgtaaaatatgtcttgttattgttactaacaatactaacaccaataatatttactcttaattccttaacaaaatgtcttgtttcatttcaaagacaataaaaaaaaacattcatatttctcgtgagcatcgaaagaacactttttttccaaaacgattgataatcaagaagtccaaagcatttcatattatttagaaatttagttgtttactaattagattgaatatcaatatctttatcaacttaatttccatattgaatcagaattgagatatactttctcatcaccaggaaataatgatatatatgacatacttgttaattgaacttaatactctcaatataggagtcaaatattgctttaacctaaaagtaatcaatattagcggtgtttttatcaaatttggattagtaaactttactaaatcctcaattgaactttctcacttctgaaccaacaaactttcggaaatgttaatatcagcttcaccatcctcgtagttcctaatttttcatcacccaaaactagaatccaattagcaaactctttaacctttgttttatattcaaagttacaaccactataaaatcacgtattttgtactgagttaaacactttgtaatatatttccataatttagaagagttaataattgtcaatagaattttcactttgtttacatttggaatacctagcaagatatatttaaaaattataatcatcaaaaatcatataattatattcttttaatttcagctaatttattgaatattttaagatgaataaatttaattctaacctagtataagtacatagtcttaagtttaggatcataatataagcaagcaagtggacaagttataatttagttttaactatagttttggttttctaatttggattatttattttctcattcttttggattatttacaattttagtttcctaaagttttaaaagctaattaggcctcttatttttaaaattgaacacaaaatttatttattgattttcttctaaaaaagaaccatattaattttctttataattttttaaccaattttttttgggttcataatgaacttgatacataaaataaaagactccggattaattgacactaaatatctcacttataccacttaatacttttatgtaaaatacaaaattaaataatctcattattagattaatttttataatttttttataaaatatattaaatttataaaaaaatcatgttaattaattcatcgtaataattaaaacaagtgacaataaatattatagaatttttttaaaaaaatgctatattgaaaattttaaattaaaaaaaatatatggtaagtatgttgaaagttgaaacctgacacgtgtttggcacattccctgtgccatgtaagttggagaggggacagacaggtaattccacaacagtatctgccaccttacttcgtcacctgtctttcggaacctgaaatcacgaaaccaccctccacactttctcaaaataccaaatacgccccttcggtataataagaatcccatatccgtatctcacaagcgaatgcgaaggagagagagagaagagccaccctttcttacaataaacaacaactcattctttcaaggcttcaacaagagaaactttcatagtttttcactccttctcccagtgtcggtgtgctcttcttctggggcattcgttttttgcttcttcagctccaacttcacacgcgcttttggtggaagaagcttcactgggatcactatggtgggtgtgtgagagagggattacggattagtgagtttttgtcactaagttagagctatgtcgtttcatgattgatgggtggtagcagtttggtgttgggattaaaggtggggctttatttggattctgtgtttgttgaaggagctggggtaggtggggcgaatgtgcttgagttttttttttaaaccaaaattgaaacttacctttctatgagtttcttctgtttcgtattggtggcttaatttggagtagctgttgcctcagaatgcagcaagatcagagaaaaaaggtgaatttgttgtttgttctcctcatttccaagcattactctaattaattgctatacaaaaataattactttttcaagcttttctctgtgctgaatgaataaggaaggtgcccttttttggtactaagctgagtttaaccgaatgaattataaaaataaaatcttgtcttgtttagtgttggtgggttactacttgctaccgagaattttagattacataagtcacagtgtgggagtgaggttctgctaagttgttggttccatggggctgtgttatgatgttagttagctctctcctaatgtttaatccatcacatgacaccatttatttcccccacgtgacatttggttgacaagatctttattattttcaccatttttttgggggggtctaatgtgttgatgaaatttgcatgatgcttctttgaactggttagatggcattcctagggttgatcttccatcccaatcaacccacccttttgcttttctttgtttctacgtattctgaaatgtgtcttgcacgctttaggtgcgttgtacgagattgactctccgaaataaacgttggtgaatgacaagaaatgatgatttggcaaagaaaaaaaaaatcgtcttaaaatgaatattggtttgccataagaattgtgatgtgttgagtggttttaagtgctgtatttcccccttcttttggctttgttaagctggggagtgaaacgttgtatggtgacaatgtgtttctttatgtttatttttgttatttttcttgtgttagtccaatctatgcagacatgatcagattactgcaaatctaatttctactctctttctttgagtctatgattcttcaatactgagtttcataatgtaaattctattgcacacacaaattttgtgttatgtgtattaagcttatgatgggtcatggattccgagatataaattaatttcccttgtaacacagcaaagaaagattatttattattttaatttctatttatcaattatgaaaatttgtttcccaattggtgctttagcttgatttattaacatttctagattatcaaatttgggcttgcctgattttcctttgcggattactttaatatctttgttacagggctcaatggagatggaatttttctccgattatggcgatgtcagcaggtacaaaattcaagaggtcattggaaaaggaagctatggtgttgtttgttcagctattgacactcatactggcgaaaaagtagcaattaaaaagattcatgatatctttgagcatgtatctgatgctgcgcgtattctgcgtgagataaagttgcttagacttcttcgacatcctgatattgttgaaattaagcatgttatgctgcctccttctaggagggactttaaagatatttatgttgtttttgagctcatggagtctgatctgcatcaagtcattaaagccaatgatgacctaacaaaagagcactatcaattttttctttaccagttacttcgagcattgaagtatattcacactggtattcttcaatatttgatagttacttgttcatgaatatcttcttttaatgtgcattgtgttgttagtgactatagcttgttttctctctacaatgaaatgtaattgaaattgtgtcattccttagcttttttcttacaaagatgtcaggatcatctatatttttttctctaactattgctgttgttgacttttttttgcacctcattcctggatctccttaaacttgtatagtacttttatggttttgccaaaatgtttttcttattcatttgtcctttttatattttactttgtctatttatcaacataaggttgctggcatcaatgtcaatattgctcaccaattacatttcaacacattgcagcaaatgtctatcatcgagacttgaagccaaagaatatactagccaatgcaaactgtaaacttaaaatatgtgattttgggttagctagagttgctttcaatgacacaccaacaactgtgttttggacggtattccatcccaacattttctctgtttgttttgtaccttttcaacagctttgctagattttttgctccctcatataaaagatattggtaacataggggctgatgttttcttgcttacttaaatacatttctataggattatgttgctacaaggtggtatagagcaccagaactctgtggatcattttactcaagggtatggctttttcaagattttcagatatcatataagtggtagagaacctaattatgcatagtcttgactcacaccatacctaattcatgctcattagttttgtgtgtagaaattgcatatcaacccatgatacatgctttctgttatcttctttctcatcaataactaaaagtaagacccaagaccaatctgttatttattcttaatccactggttttctgtttctattagttttattttgtgtctgctgatgagctaacggtaaggtactgactgcagtatactccagcaattgacatttggagtataggttgcatctttgctgaagtattaataggaaagcctcttttccctgggaaaaacgttgtccatcagttggatctgatgacagatttgcttggcactccctcgctggatactatatccaaggtagtttctttttttctctttagagggaaaactgcttgtattttcttaactaagtttcactaacatcattgtttggctggtttacaattttgaatctgtgttggatgcaggtacgcaatgataaggcacggagatacctaactagtatgaggaaaaagcagcctataccatttgcacaaaaatttcctaatgcagaccctttagcactacgactactggaaaggttgctcgcctttgatccaaaagatcggcctactgctgaagaggtttttatattgttctctatttcttacgtgtgtgtgtgtgtgttgaaaaatcattctactcagataattaactgcttcttgagcttatgctttttctttggagtttggagaatacaacaacaacaacgcctgatcccactaggtggggtcggctagtttggagaatagaaatgtataattgatgtgcaacaatatgtgacttccttgctttagaattctgaaggatttgacattttcaggcattagctgatccttacttcaagggactttcaaagattgagagggaaccttcctgccagcctattacaaaaatggagtttgaattcgaaaggagaagagtcacaaaggaagaaattggagagttaattttccgtgagattctagagtaccatcctcaattattgaaagactacataaatggaacagagagaactaattttctttatccaaggtttttatttttggtttattgatttatacttcaactgtttatcttcttttccttaatatttttaattcatatgttctactctattattctctccttaccctttattggtgcatattcttcacagtgctgttgatcagttcaaacagcagttttctcatctcgaggaaaatggtggtaaaagttatccaattatgccacttgaaagaaagcatgcatcacttccaaggtaattcactaatgtagtagtatctcattggtttcacttgtcattggttgtaatcataggttgttaacaataggttactttgattgtattatatttaagatatctcttcattagatataaccagttttttaaaacaataaccggttatgtcaaatcataacaggttgtacaaatttggttttggttatggttatgataacaacttgtagtctggttatttagtagttatggttatggttacttgaataaccaaatcatgaacagcgttagacataactcaatcccacaaaactcacttgtaaggtgaggattatccaaactttataacctccatttacatcatatctctagttgatactaaatacaccccttcaaagctgcaattaaggcaggtcaaggatgaccgcaattaagatgactttccaacagtttttacatagcgtaatacagtatcaaagtggtgtttacaccttgtagttaaatgttgagatcttacattgactagagacatggattagtagtgaagtctaagggttgtatatacccttcacttcaaacccgctgttgatatttatttgagccatgttttatattgctgctaattactttctatgtgccctttttcttaattcatttccccactatcctatttatctgctctttgaatgtctcagcatggcatgagatgaaatcgaccaaaataatccacatcttctcctggctgcatttgctgttacaactgtttcattcatagggagcctaatcagattacatcacactgaacttttgtttgtttgctttcctcttttttggaatcattgacaggtcaacaatggtacattcaaatatggtaccctcgaaagagcaatcaaacattgcttcctgcataaaccggcagacaactggggaatttaataataattccagggatacagaaagtcctgcgccaaggtctattccgggtctgcaaaaattttcacaaggtatgtgattgttatcaattatcatcatgcctttgtttagtttgtatgcattattagtaatcaataagctaacattcttgtattcagcaaaacctggaaaagttgttgggccagtgattccatacgaatatgcaagtgttgtcaagggtacatatgatccaaggacatttatgagaggttctgttcttccttctcaacctatcctccctacgaatcattatcaacgatcaacctctggaaaacaagaaaggtcagcaacagaagctgacaagggtgtatctttacaatcaaaacttgctcagcaatgtggtgtgaatgccaaaatagcaccagacacagctatcaatattgacaccaacccttttttcatgacacgagcaggagtgaacaagatagagcaggatgaccgaatagccattgagacaaagttgctgcagtcaaaggctcatcaatatggtgggattagtaccactgctcatagaaaggttggacctgttcagtatggcatgacaaggttgttctagaagaatgttgtcttgtgaatagtttggccaggtggagcaatccttgtggagaataagaaaaggttcttcatagtggagaagtagcagtctctggtggtgctttgtgtaagacgatgatgatgacatgagttagtgcttccccagaaagagccagctttctctgggcaaaccttgtaaacattggtttcagttatcaataaactgtacaaccgaatttgagtcctatcttgtaattcaatccacacattcctttgctcaagataatttttttttttaaaaaaattttcctgcaataactattttccaagtagaaataaataaatcagactggtacgtgtactactgtacgagtaaaaatgtggataatgtaaagtgtttttatgcgggttatacacaccggatacaaaggagtttcattgtttaaccatagtgtttttaaccacctttggccattataaaaacagattcctcacgagtttctttaacaactggattccatttaaaattttatcaaatggttcaaatgctaccaaattttcctcacctaggcacagtaacaatttatccttgaaagtaggtttggtgcttgcataatttccttctatttaggttttttattttgaaagaagaaaaatacctcattgttttattggaatcaaaccccaaacaaatagtttgagcattggaccgaatacgacatcacagtattcatatgattttaaaaatttgaacggacatgtgcccaccttcacccctcatggagccacattggccttccatgtggaggaagttactgtagctaccttttggaagctctatctaatagctagctatactggataagattaacttttatgtggaggctagcttttagaatgtacaaccacttgtaagttgtaactcttgttttttcctacttcttactttagaatagttaaaatgctaatggtggaaagtgtgatgcaaagagacttgtttaggttgttactaacctatcagaaaacctggtggaacactcttataatgttgcattgcaatttgcagcccgtataatagaattgaagaaaaaaaaagaaaaaaaagagccacaagattggctctaaaatgtactgtaacattgtttgttgatttacattgatcattaatttaaggtcatacattaaaaacattaaaaagaatgacctagaaaatgaggtaaatccgaaattgagacaatgcatttgaatgatctggtcgcttgtttattgtttggcatttactgcatatgcaagctgc

SEQ ID NO: 317 - DNA, 3507 bp, Glycine max
atattttatcccattttccttcctttgttctttgctcattttttatttatttattaaagtgtcctctaaacatctcttatagttcacgttacttgagccactgagcattcttcttaaaaaaataccatggtttggactcctcacctaacaaacgtggtatttatttgacttgttccttttattaatttattggtatatgttaacttataattgttatacaaacaatactattttctttacaacatcctaacaacaggaaataaaaagaaaacaaaatgaggtggttattttgtcattagaaataaatttattctaattgaaaattaaaagagaaatataggaagtactagctatgttttcaaaatatgattttgtgtaaacaaaattaataattttggaaaaataatttcaaagtttggcttttgagtccaactttttatactatgttcgagacactgttttttgtttgctaatttgcttaaagttacatccaactgttgtgatctgttagttcttatgggctatagcttgataaattgaaatgaactatagttattagtattttctaattaaagaatgttttgaaatatcagttgaagtgtaattatataatctattaaatattttaattcttttaaaaaatatatattgaacaaatttatatattatataaaataaacttctaagtattttgaaataaaattcactttaaatttattgatatactcttaagttttttgtatatatacacctatatccttgcataaatagtttttgttaactgaaaaaataataattattattttttttaaattgaaaataaaaatcaccatttaattaaaattttaaaataactgtaaataaaaatagaaaccttcttcaaaaataacatcaaaaaagagatggaggtaatattattatttatcttttttgcttcattttttattaacttcattgtttgtttgtttgtatatcctcgaaaatgatgagtgaagcggctggtgaaccctaattagttgtcggtgtttgttggaagagctcatctctgttttcttcgtcatcttccccaaccagagatgcgccccacaacagatacttactaaagctttcaactttccaacaccctttcaggtttcttacctctttcaccctcttttcgttcttcttcacatctctacttgatttcaaagaaagagtttttgttttagttaattttatctctcttgtaattcacccatctaattttttttttatagtttttgttattcccaattgtaatggtactatggagggcaactaatcactggcttgcatttgcattagatattgttttaaaaaatttcataatgtttatactggtgagtgtagagttgggttagtagaaagtagaaacatttcttgaggggtggcaagattgacatgttatggaaggggctgttgaattattaacatgataaatgtggttctgtgtttcactctcactgtagctaggctaacaaattgggttatagtgagtgaccttttgaattgattgtgtacttgtttgtgttcacattgggttatcaagaagcaggttgaaatatcaggtaaatgtccacatgttttgttccacttagaggaattgattttgagttaaaacaactttaggtagtttttgcattgggtaacaaaattatactgagttttactactaacttgcatttagaataaacacttctagacataaattgcatcacttcaaaatcaattttaatcaaaattaatttggtaaatactcacccaaaagcttgagggcttgttttcttggcaggtgtatgattaagtgttgttatgttgtaatgttaacattgtaaattttgttggtaattacatagttcaacttgaattgcacgcagatgttagccaaggcccataacaaaggggatggatctaagtccctggctaagatactggcaaaatggaaagaatataatgcccagattgattccagcagtgatgcagataagccaattcgcaaagttcctgccaaaggatcgaagaaggggtgcatgaaaggtaaaggggggccagagaactcacggtgtaactaccgaggtgtcaggcaaaggacttggggaaagtgggttgctgaaattcgagagccaaacagaggcaataggctttggctaggtactttccccactgccattggagctgcccttgcatatgatgaagcggccagggcaatgtacggttcctgtgcccgtctcaactttcccaatgtttcagtttccagtttctctgaggaatcttccaaagattctccgtctgcgaatcattgtggttcctcaatggcagtgtctgcaaacgagtccatgatttcacctagtaactctggggtagatgcagaagaggatgttgatatggagcccatttccttatccttaagtgtaaagcatgagaatggggaaggtgaatcggggataagttcatcccctccttcttcctcatgatgtacattgggacatggctaaattttttagcacatgtacttgttaatggttagcttagatttgatcacatttggtcctggagattagctgttgtaaaactaaaatgaactccgttgcaaaaatggtcaattcttttggccgcctaatttgcatggatatctgtctatttttaactcgttagggtgtgaatcatacttacctttgtcatgttacatgctctcttccctcacctctacatctccaaacccatttgttattgtctctatcttgcccggtttattttactgtgagaatgtggttttcttaattttaagagcttacatttctcatgtaagtttctatttacataacacttgacttgccatgcatgattgggttataggggatggaagcttttggaaataggaatagtctataggaaatctccatgggtctctagaggaacaaattaggaagtatttcagcacgtttggaaccgcgatgtgaactcatggtaactttaaagctagcctctggtgtggtgtagtaactttctgtaatcatgttaattatcatcttttcaattatgtcatttttctatttaattcttaacttatatagttatcatgaatgagaaatgattaataatgaaagttatagtatttagaagttaagaatatttttaataaattatattaattatgtttgttagtttaggtattattttttactatactatattattcttttgcttgtgatttgtgtgtatcaaatccattcgtcatgaattgattgtataaaattatgaatgattttgaacttgtatgaaatataaaaaataaaattaggtataatatgttgttttttacattatttttaaataaaaacaatgacaatatttaaaatattgcatcctcaaatattaaaaaattgaaaacattcattgccaagtttcacattgaaattagctctggctgagttccagtcttacacgcacccgtatttccaatcaaaaagagttctaagggaattgaat

SEQ ID NO: 318 - DNA, 3185 bp, Glycine max
acaaactgttataccaaactgagaattttacaatttccaaagatgcaattctcaaccattaaccaatttcatcttaaacactaacagttcttcagtcttgaactttccatgctgaaaatttgttgcctatttcttttataggcagtggcttcttatgagagtcacactctctgaacttcttacgtaatacttgacttttcattttgtgctttataattgttatctcatgcattgcacttttaagataaggttgttgtgcattgtttggttgagtgcaacgatttactgattaccatagctacttgtggatcttatattttcaaaagtgtatgcttggtcattaatcaaccaagcatgataagccccatcatctaccaccccttctataccatatacgcattttgcttatctacattgctactgttacactcaaacaagtctaacagataatacgttaagttaatgaacatttttagtaatattattataaggattggccaatgtaattgtgaagagagaagcatgctttaagctacccaacaaaatggataagagtttcagttgatatggttctcttgtttcttttccaataaaaaaccaactttaaaatataaaatttactgtaacaaaggaacaaagagttttcacttaatccatgaatgagaaaggatggtcacaaaatatgttaggttaatatggaatgagggcactgtgcaaactacacaaataatatcaattccaccaccatcacacatttacgttcttccaaggaagagataagataatggagcctccacgtgtcacctccacatggtacctaacaataaggctaccattcaaaattttcctcactcgtgtggcctatatgctgtaatgtcatcacttattcaatccaacggttgtaacttttcggcaaccaatcctctccatttcacaccattggattagtactacacaaatcacactattatatatagcaagtttgagcagaagcttggatatctggcagcagaaaaacaagtagttgagaactaagaagaaggaaatggcttcctcaatgatctcctccccagctgttaccaccgtcaaccgtgccggtgccggcatggttgctccattcaccggcctcaaatccatggctggcttccccacgaggaagaccaacaatgacattacctccattgctagcaacggtggaagagtacaatgcatgcaggtaagacaactccacacatatatacacacaagaggcaccaaaaagtttaaaattcatcttacacatttatatatgctccaaaatgttacttaatttaacatgttagtcataggttacttaaattaacatgttagtcataggaaaatgtgcacatgtgcatgtttgttaactaacttttcatgcaaattactaggtgtggccaccaattggcaagaagaagttcgagactctttcctacttgccagacctcgatgatgcccaattggcaaaggaagtcgaataccttctaaggaaaggatggattccttgcttggaattcgagttggaggtcaatttcttgcaaccccttttggtttaattatagtttcttagtcttagtttgtttcaacttattttgaagaaataatcgcttctcttgctggcgtgctaaaagtacttttggaaacaaaaaaaaaaaaaaaaaaaagagaagtggttgttttccaaaatttaagtttatctaatggatttttctatctcagacttatcaatattgatcaaatctgtccctattattacaaaacaagcacttggttttgagttttgatggttgatatgtttgttgtgtttgtatatagcacggtttcgtgtaccgtgagcacaacaggtcacctggatactatgatggacgctactggaccatgtggaagctgcctatgtttggctgcactgatgcttctcaggtgttgaaggagcttcaagaggctaagactgcataccccaatggcttcatccgtatcattggatttgacaacgttcgccaagtgcagtgcatcagcttcatcgcctacaagcccccaggcttctaagtcattgaaaaatttgcaaagcatctgtagccaccccactttgtttgttgtacttaaactacattcccatttgtttttgctttatgagatttcatcatcctgtatttttggtttctgttttcggacttcaatggaaattaatggatgagaactaatgaataagctattgtgttgtgttgctttgtttccaaataacttcaagaacccattgtccttgcatttccatcttgtgggttgaaattagtctcttctaaatttaagttaattgtgtcactaaatgatggttaacaaaggaattctttctgcgttattcaaagtacacagcatagtttagttgagcttggccttactttgtcacaaatctgatgtatgaatgttctttatactctggttttccaagaaatgaagttcaagagatagtttgtaaacatgttgctactgaactttcaaaaccaaacatgagccccataattcttggaaacacagatattttgtatggtatatagcaacaaaatctactaaggaactgctaccaaaccgttttgttatttatgtgcaaagaaagcgatatcaaattcaaatttttgttggtttcagaaacttttctttccaagcaataaccatcaactgcaactaaaccgttttgtttgttccatttctcatctcctcactgcaattttcaaattatgatttggataacacataaaaacacaatcagatttggtcatgctctggttctaccaaatacttttttttttctagaattgcctgaatctgatccttagctgacaattaatctcaagatgattctattgtttgtaacttgatagttatggattagcaactgatagataaatcatggttctaagttgtgagtagttataggtaacttatctcgacaccgttgttagtaggttgcattaatatttagattggaccctttcgatataacaatgatacaataagataaagaaatagataagtttcacctcctttactcccatgaccacatcatgacatattcaaagtcaatggtgaatacacaaatcaaaggattttttttccaaatatttatttgtggatgtgaatatactcatcctagaagcaagtttctttaaata

SEQ ID NO: 319 - DNA, 28230 bp, Glycine max
  modified_base (8834)..(8933): a, c, t, g, unknown or other
ggaagcataaaaaaaatatacgacatggttaggaatttttttttagtatgtctgacataattttttaaatgttttggcttcatatgaatttaacagtgcgtcatatgaacttacacactcattatattttttaaccttttaaatgattttaaaaaaaatatgacagatgcaatcttattttcactttttatactttcactactgcttcatatgacctaaagtcagagaaatattttaaaaagataaatacgataaagaatacgatgagaaagaaacctcacacaatgaatagaccaaattagacctatttattttccttagaaataaagaaaataattattttttattttttcacattacatttatatttttctatcactttctctatttaggtattgattggcatatgagtgtacatgaatttttttttttaaaaaaagcgtaaatattaattatattcatgcattatttgttttctgtctttcattttctatttaatcttacgttatcaataatttattattaaattttatagttgatgatgaatatataagagatataaataaaaaaaataattaattttataataaaaattaaaaaataattattttgagataaaaaattttaagagaacaattataaacggagagtattatatttagttttatgtaccgtgtacgtgtctactaacatggtgtctctccatcattttcgtaggaaaaaacattataggagtatgaaaaaagcaaaagttttgtctgtttatggttttgtatatacccagctctacttggcagcaattacccgtcttgcttgctacttacgagacacgtacattaacacttgtcctagctagtgcatgcaattgccaccccattcatcactcctcccttttccttctctttatatttatatatatatatatatatatatatatatatatatatatatatatatatataaacaagcacaatgcatcatctcaaagaaattaagagagttttttttgttcctcactgaccaagccatggcgatgagaaccaaactttctttagctatctttttcttttttcttttagccttattttcaaacctagcctttggcaaatgtaaagaaaccgaggtagaagaagaagaccctgagctcgtaacatgcaaacaccaatgccaacagccacagcaatacactgagggtgacaagcgggtatgcttgcaaagatgtgacaggtatcatcgtatgaagcaagagcgagagaaacaaatccaagaggaaactcgtgagaagaaagaggaggaaagccgtgaaagggaagaagaacaacaagagcagcatgaggaacaagatgaaaatccctacatttttgaggaagataaggattttgagaccagagtcgaaactgaaggtggcagaattcgggttctcaagaagttcactgaaaaatccaagcttcttcagggcattgagaacttccgtttggccattttggaagctagagcacacacgttcgtgtctcctcgccactttgattccgaggttgtttttttcaacatcaagggtacgtaaatttaaattaagcaaaatatatattctttttagtttaagatatttgcatatgagttttgacttctgagtttaatgttgatgcatgcatttactaaccatttaaaataattttatacttttattcaatcataaaatattatttttataacttttaaaataattattatatttatataataataagttataattagacgtcatataaaattattttacactatattttttcttttatatatatatatatataatattaatttattgatgctttttttattaatttgttggtgattcacacatctactgttgatgctgtacaattttgtgaaatttccttacttcatttgttgtatttctatttatttactagggcgagccgtacttgggttggtgagtgaaagtgaaacagaaaaaatcacccttgaacctggggacatgatacacataccagctggcaccccactgtacatcgttaacagagatgagaatgataagctcttccttgccatgctccatatacctgtctctgtctctactcctggaaaatttgaggtaattgcttctaattatatatacatatggattagttaagtttttaataacatgcaaaagtctagagaactagaccaaacaaagttttgatcattaattaaaaatcaaatttcaaaatctttagaaactaaatcaatactcacaattgagttcacatgttaactaattaaagcaagtagaagatggtatatacgatatagttgaatattatattttatactgatcgaaggaaattgtggtgtaggaatttttcgggcctggaggacgagacccagaatcggtcctctcagcattcagctggaatgtgctgcaagctgcgctccaagtatatagacccttaatttctagctatcatgcatcaatattatattatagcataaagtaacattaaatgctactaatttggcttgtcaatttcattaacttggtttcttgtattttttaccaaaatggaaaataattacagaccccaaaaggaaagttagaaaagctttttgatcaacagaacgagggaagtattttcgcaataagcagagaacaggtgcgtgcgttggcccctaccaagaaaagctcttggtggccattcggtggcgaatccaagcctcaattcaatattttcagcaagcgtcccactatctccaacggatatggtcgtttaactgaagttggtcctgacgatgatgaaaagagttggcttcaaagactcaatctcatgcttacctttaccaacatcacccaggtatattatcaacacgcttatcttatctttatttatttatctcattaactgatgagtaagttactagtttttgaactgttatcaactctaatgtagactacgtttattaatttcaaacaataattctcttaattggttgtcatttttttatcagtttggttaatatcttggttgccatctatagtaaatagaacttaaattcttggtaatctttcaagaaaaaacagtacatgtatatatagtgtaaagatcattgacattatcaaccaatttgatattgttcaatggtagtctttttggctttatcataattaaatttttcttaacatgaaaacaagccttgtgactgataacattatattatttccataagatattgtcatggatggtagctagttttttcttacttttataataattaacttattctttaagatgataacgtgatctgggactgatcttgacagtttaaaatttactgcatagatttgaactcaattcttaataatgatttgcatgttctcctataatttaatagagatctatgagtactattcactacaactcacatgcaacgaagatagcactggtgatcgatggcagagggcatcttcaaatatcatgtccacacatgtcatcaaggtcgtcacactcgaagcatgataagagtagcccttcataccatagaatcagttccgatttgaagcctggaatggtgtttgttgtccctcccggtcatcccttcgtcaccatagcttccaataaagagaatctcctcatgatttgcttcgaggttaacgctcgagacaacaagaagtttacatttgcaggtaggcacacacacataaacccttagttatgccatgcatacattttttttatgcatgcatgttcatttggtttttaattagtttattgcaaagttgaagctagttattatatatattgtgtgtaacagggaaggacaacattgtgagttctctggacaacgttgctaaggagcttgcctttaactatccttctgagatggtgaacggagtattcgaccgaaaggagagtttctttttcccttttgagttgccgagagaggagcgtggtcgtcgcgctgatgcgtgagaggtttagaacaatcaagaaaaggtgtgcatgtggctgaagatcacggggaatgtattaagcttcagagactctttaaattaaattttctgtattttgtgttatatgttactagttctttaaattagccagatggagtttatgtgtatctaaatgcagggatgctaatggaataaaatggccacttgtattgttagctatctcttatggtagcagaataagacgtaaactggttctttgctccaagtctaaattccttaaatcatgaatacttacataagaaaagaaaaaagaaaaaaataaaataactatcattataagttaaaagtagaactttttaatattagttttttaaaaatggtttttactttatgcatattttaattttagtttataaaaaaaatattttttttatttctttgtcataggtgttataaaaaaatttatctaaacacaatttaattcatgtaaaaaatttaaaggttgatgcaatttaattcacctaaaaaattcataggttgatgtagtgttataagatcctacagtgttctattattttttgaaaaatttcatgcttaatttgttttgaacgtgtccaaaatttctttggatttttattttttgaaattctattattttttgaaaattttcatgtttgattagtttttaatgtgtccaaaatttctttggatttggtggaaatagtgggaccaagattaatctctatggatattcatgatttctgatataagataaaaaaaaaatgtttccaacgtcctcaatcagacaatactcaatatgaaacgttaatattattatttcacattatatattccatttaataagaaatgctaatctttccataccatttttatatctctattttaaagaattaagattacaacaattgtttgggaaaatatacgctaattaagatttttttttttcaatcctctcgtactactaatctttttctacttgtttatgtatggttattttattaatttattttgtttaaaattaaaaaaaattaccaaataaagaaaatatatttaccataggagtagtaaatatcataggagttaaaaaacttgctggttaataagagaacacacaatcgggataagtgataacccttcaccctcgtcttatccaaaataatctccgactgtagttccgaattgggtggttgagaaccagctgttagtttgtagagactatgatttaaccgtaacaatttacagttttacgtacgccagattcacgtacttggtgatggaaaaagtattgtgaagctccctgtaaactagttttgttatgtactgcatgattactttgggggtagtagctccttccttgtatgaaggcaatgtcatatctctttacatcatttaaaataaataaattactttttgttgtacaaactaaaatactaagttgaaacttataagcaagagaaaattggatgggttattgtagcaaatgaaccttaaggtgcttgccattggcagctcttgattgctatttaaacctccctaggtgttggtatcaatatttattttgacaaaaatgtctcctcataaagaaaacatgtatttgggtgaattatacaatgaatttaagttttcgatcactttatataagaatttctatatataatagaaataggtttttatatactgcgtactattatattttggcattctattatacaacaaaaatttatctccattgtatatgtttaccctactatataatgaaaatgagtatcatcagttatgtatataatgcacatataatatatattacaaaataaatataaatattaaaatataatttaataatgtatacttctgtgtgcctcccttttcctaggaaacagtagtatgaagaaatgagtgtcttgcttgctgttgctggttatgagacacgtacgttaacactcgtccaagtgcgctgcattctccatgcaatcctatattcctttcaataataatacacaaacaatggcttattttatatatcacacggttaacaccttttaactttttatattttttttatcacaccataaatcatataatatttatatttttcaaataattattttttgataatattttattttatacatccaactaataatttttaattctctatttctctttcaatcgtatcatattatatcatttattatattaatattttttttctcgagttattatcggttggtgttaagtaccaaaaataacttttttcatgttattctttttcttttatctctatatacttataacataatgggtatcctatgaaacatttttaacattcccttttctttccgatcatttaaataacacatctacagtgcatgcatgccctcttacatgtcaaagaaagaaagagcgaacacgccatggcgatgatgagagccaaagctttctttagctatcttcctcttcgccttgggcacaaaagaaaccgaggtagaagagctcaaaacgtgtaaaaaccagtgctaacagcaacagcaatatactaagagcgacttgcggatatgcatgcaatgctgtgacatgtattctcgtatgaagaaattaagagcctgagatggagggaaaaggtaatcctcatcagtagtaggtgttagcaaatcatagtccaatatactagggaaaagagtacaccaggagattctcaaaggggctcaggtcgatcaaaggaaggatagtggatttttttggggggtaattttggaaaaataaaataaaataaaacgggagtgtattaagaaatagggagaatggtatagcaaatgccgaatgttagttcgtcttccctcatgggactagccggcccttctcaccttattgggcctatcaacagtgggattttcttcttacatcatcagtcatttttcttctacatccaacatattttcttataattttaacattgtcattcataaggccaatctgtatacggattggtatagaacctacagattattaaaaatatgttttacgtataaaataatttaaaattaatgattcatacaaatctttaattcatgactattgtgttattaacacgatactctaacaaattaaactaatagattaattatgttaaaaaataattaatattgttgtatataacactaaaatttataatgtatatttaatacacatataagtttatataataaattttgtaataattaattttaatctaataatatattttttacatatataaattttaaataaaaattataggtttaataaaaatttatatatatataaaaaaatattattagatcaaaataaattattaaaaaatttattatataaacttatatgtatagtaaatatatattaaatttttttatatataaaaacattaattattttttaatataattgtccagattagaacattatattaatgatacaaaaatcacaagttaaattatcctctcacacgtgtatgagaaaatttgttgaatacaagaagaaaatcccaccaatagtttgggttgtgttttgtcttctttgatactactaatgaaggatagtactttaattaagattttttttttctttcattcctctagtactactaatttttcaacttaaaataatatagtaccaattcatttatgtttattttactattttttaattaaaaataaaaaatttccaaataaagaaaattaattaccaaatagtaatcttcttttttttttatctgagctagatccttggttactagattaatctgttatgagtaatttattttggcaatatgactggtatataacattttattaaaatgtcttcttaattaacttataattaatgtgcatacttctgaaacttcaaaattaacgtacttaaaaataattttgcattccaattgaactacacaatctactagtggcagatttattggtagtaattattagtgctacatgctttgtccttcattcttgttcttaaaattaatttggtgcttaaattgaccagttacgacaatctttggattttgtcgatcacttgatgatgtcatgaagcaattgcatgcttttttgtagcgctgtcgtgagtgaagcacagattaccacagaacagatgatgacactaattcatccgccatcacaagcaccgcagcattgacttccaagctataagcctttccctccctccctatacctaacctacgcactatttgtattttttatttaattaatctattttacatgtattattagctacataatatatatatatatatatagttatatataaaaaatgtaagaaagatagattaaataaaaaaaacacataaaaatagtgttgaatatataaaagaatagaaagttatttagatataaataattatttatttattttttatttttacttgagtaagtaattaacgatagtaattatataactaaaatagataattggggttagctagtcctaagaactataccttgactgtgcattatattcataatttttttttaatgcactttcacttactttttttttttctctttttttttcctcacttattgaaataaaatttaaaaatactcggtaccaaaaataaaaaaaatgattagttcgtcccttacattaaagagataaagataaagacactcacacagaggtatgcgtgtgtaaaaaaacatagaatcactaataatagatcccaagcgaggacccctctcaccacataaaatatgtccctatggaaccatgaattaagtatgaacctggtgcatgaaaagggagcaatcaaggcccggccaggagatttcaaatgaaagagcggcggagaactaaataaaannnnnnnnnnnnnnnnnnnnnnnnnnnnnnnnnnnnnnnnnnnnnnnnnnnnnnnnnnnnnnnnnnnnnnnnnnnnnnnnnnnnnnnnnnnnnnnnnnnnacagtacttgctgaacacagtaactcctaatagaagaaacctgcacggattaaaacacgagagcggttcagctccatgcacgtggctgcagcaaataatggatcatggaagcggcaaaatcaacagtgatcctacgccaaccatgatatcacactcccacatatacatatatattcatacgtacccaattcaactgagtcagtctctgcattcaccagtctgctctgcaacactgctagtatataaccggtgaagtgaattcatgtaggaccatatatatatatatatatatagggtttaataaatgaaatttaatatttcacattgccttgttgactctacccaaattaattatcaacccccaatcctcgtttggcctcttgtcttctgaacatttagcatcattaattaagttcttattcttgccagttgcactatataacatatcttgtttaacaagcaaaaacaatcagagatttattaatttttaatattatatgatagtagtgatggcctaatcgtgacatcaccttatacatttaaccataatgtaacgaccaatacattcgttacacctatatacattttcattgtcttattatggtccatgcctagctagcttgacctagctagcttgcgtatcctgtctcgttatttggtcattctcttgctgatgagatacatattcatacctatcatctgttttggattttgctgttttgatgctacttctacaggacagacacttttactaagctccagtgaacaacatgtacaatcctagaaattaaggagtcacaggtcgagaagaaccggaaattcccttgcacgtagctttgcaaaaatataatgcccgtgttaaaaaaaaaaactcgattgttgatgctgaaaactcgtgaaagaatctgcaaatagatgatgagaaagaaagtgagaaatgacgatatatatatatacacacatatgagtttgtggtgcttttaatttttgttgttgtttgaacaaagattggattggatgatgcattggcgtgaggtaggagtggagtagtactggtgagatcagatctagctagcgtttgttttgacgccttccaaagccaatgaacttttatcatagccctttgtgcaactttcaagcgtgcgtcaatattgtcagatatcagaattctctctctgcaaaatgtgtctgtctctccctatatgaaacttacaaccttactactataacattcgaaaatttgaacatcatcatcatttaccacttaaccaaaacgtttacatttgagacgccagagaacttttgagatcagcatctctgttcgctttttgagagcttaaaaactgatcaaaacgaacttaattgtttgaactcaaagttaattttagcccaaatattaattccttaacgtgagatcaaaagagaccttttacttaaatttgtgttaattattcaattgattttcaacgtaattttttataaattatgtaaatccaaacatacccccatgggcctatatgcactgtgttaaaatatatagaaattgtttaggtattagtgcactaaagttatttaattaatttaaaactctgattgtcatcgtatattgtcattagacaatctatttttaaaaaaattatgtatattttttacttgagataattttgtttggattggataaaattattataaaagttttttctttaaatatttaatataattatatatttaaaactcaaatttaaaatttttagttaatctaaaataacttctcacattaataaatttaattatacatagtataaatcttttgcacgtacatatatattcgcacttgatatcggatgatatatatatatatatatatatatatatatatatatcagttaaaattgtggcataatggttaaaaataatgatataatcatgatcctggaagccaagcatttggcattaggtcatgattctgaagatatttagctaggctctttcatgattcatgatgagtgccccactgtcctatatatgggtaattgggtatcgactatcgatatcgaatatcaagtccaatgcgaatgcaattcaaagttgcaggtaagactttctcttttgtggaatcacttgtcaatttggcaattatgattaagtggtccactccaaaaaggccaaactcctactgatgcatgttgaagtgcacacaaccctagccctcgcatgcattacgtataaccaataaaagtgagtctaaacatttatcattgaaattgtaaagcatatgtaaaagggctgcatgtacagttccactcgatttggttttctgttttttttttttaaccacactataagattaatcttctgcgtacgtttttgagattttttttatagattatgtgttctgaaaataaatttgttcgaattaaattaaattattataaatcacaaaactttgacaccaattttgagcattttacttgattttataatcaaaatttaaactcgagattactggttaaataacaatattattctgtcaattgatccacataagccatagtttcgtggatttaattgagtaacaactatccctgtctttcaatacgtattttgctagagttgaaaacaagtcttttctcataaggctagtatgtatttacaattgaaccatctacttgaattccactgtatatataagttcattcaagaatcaccaccaaatattaaaccagatcattccatttttctattacgtcacttgctaaacttggttgtcaacgacattggggatcaaagattcaggcacacacagtgacagcgtaagcaagcaagcatgggacgatcaggaccccagtggagctgacgtgaattcatcatacattctccaaccaattattgagggaattgattacagctttcgtattttttgtttgaatttttcttaattaacaactataaagagtacgcggttaatgaattgtggtaaaagttattgaataaaaagtatgatatttgatgaaaaagttaattttaaatgtactctaagtatttcatttcaagttatagtttttcgttttaattctataacaaatgttctaaacgcatttgttgacaaattaaaatcgctttttttgattaattgttttacgaagtttgattcatgaaaattggagatagatggatatatatcgtatgacatcattaattatggacgtgttaggtgttttgtcaatatttatccatttatgacaatgatttaattcacgatatttaaaagcaaaaactcctttatgtttttcaattgttcagctttaatataatttatgtacgggacgtcattcgtagttgagttggtatgattatttttgtactacatagcattcgtctttatataaccgttattgtcaagcacaactaacaccaacttacttatcatggttagtataagcaataagtaactcgctcgcaagccctaactcattttcctccactcctatcccctctatagagtatactctctttacctctatctggtgtgccagcatactcgtactgtatgttaatatatgatagtattaattactttaattttttacaccacaaaagtatatatagtagttacttttagcaactgaaaaattaatttttgaataggaaatggtgaatgagtaaggcaatatgaggcagattaaggaccattttagcctagtggggttgtattgtacttcaatatatagtggccaagccttggtagggccagaggaagggggaaactgatgaagtaggtgaacaattcaattacttacatgaaaagtgcaactctctttcgggttggtccttatgcattatatttcaagccatcttcatcatgggaaccaaccttcatattgtgggagaaatatatataggacaccattcacgtgatttacagctaccaactttgaatctttgatccacgaaagtccggccattaattattattgttttatgtaagagatttttttttattaaaattgaatttaacttaataaaaaaaattaattcaagaggaaacattattcgtcttctaaaaagtattttagccatattattagttgatgtatatgtgacattgagttcttttttggtagaaataacttgttaaactgaaataatctatagcctttgatccattaactcggtgatacactaaactctgttataatttgaaagctttattcacggtgctctaattaatatactaatgtggagattagtaagagttaagaaaatagggaattttttcttaaaaaaagaaaatagggaattgaatcttcaagtacgacaaattttatcggtcgtcttaagtaaggaaatataaatgaggtatatttttatgacgatggatacatttatcaattgccaaaaaataaaaaattatttgaacaataatacatattagttggaagaaataatgcttaaaggctaatattgaaaagaaataaaaatagctataacaactttttcaaaatttaaaaaacaaataggaaaagaatcttcttattttacttggatttatatctatacaagtcataatttgaagttgtagtttaaatccacgaatttactgtataaaaaaatccacgaatttagattagaatcaatttcattattcaaaactcatttatctaaattagaatttttaatccaatgcaagtcaatgacaatacgcactaagtttataagaaaagatatgaatttagtaaaaagaaaaatctttaacaacaaataatatgaacccaagatcatagtaaaaagaaacagacagaaaaatttgaacaaatgaaacacaactacacataaattagtatagaagtaaaatcgcaattaaatctaaataaaagatatatagtactagtagtagtatcttaaaatgagggagtaattaattaaaggaagataagaatggtcagctagtattttgctttgaagattttggaaatgagagcccctttaggccgcttctgtggcttctgtattctatagactcgctattttttttttgtccgtcaaaagcatattgtttgcttcgcgaaatagaaacataagtgtgtcaagtgtcaaccccttgtccccacttgaaatttgtgtcccctgttacccccattacattactcaacccattattaattttttggtctaaaaatacagtgcaattattaagttttaaggcgaagaattttatcttatgtcaaaattagtacattaagtagaatcaaaaccctaactagctagtcttttcttcagttacattaatagaggaaagaactttatgaaaattttcaaaacatatttaatgtatgcctttgacagccaaaaattttaaatttgcatgaccaaacaacctgtcttccacttctgtccaaaaataattattgaaaaaaacctgtctcattgacaataaaatcaagataaaatatataagtaatcatcgattaattttttagattaagttaaattttatctcataaaatataagatgatgatatcagaatatatttattatttatttaaaatactagacgtgagatgatgtattaaaaaaaattcaaattttatatcatttaaaataaaattaagataaaatatataagttaataacttttacaaatctaagaataatttttacaacgcaacgaatgaaaatagtgtagcaaagccaaaggtgaaataacacattaacacaaatcgaaaactaacgtgccaaaagcaagtgatttagatttagattcaaagaaggcatagttcaaaccacgaagcacgtcttatcgatccggagagtctggtaaataatgtgatgtctaaaaaaagtgggaacatgatatgaaaaaaccctcagagaatctcatcaaatttgccatttttcataacaatatatacaagtgccaggcggcacgttgccagaatgtcttcaggttaaagttttcgtgtctcccttagtaaaaagaaattcttatctagacttcattagcagaaaatgtgtaccctcaattattaatattcattaatttgttatcattttgaatacgaaaaattcttttataaaaacatttgtatatagctttttttatttacttagcaactataaatatcaatgacttattataaatattaactcttatgtaccttatcaatgacttattataattatgaaaaaaaaatgttatgaatatatattttaaccgattccaaacgaaattaataatatgaatagataaaaaaaactttatgtaactgcggcaaagtcaaatcagaaaaaaaaagtattttcatacatgtttcactaaaactccttactatttttcaatatactagtgtttcttaatttagtattttttctattttaaaataattattattcaaaattattacatatccaaattaaaaaaaagtccactacttattcttaattttaaaaaatagcataatttacttaagtatattattatttccctttaaaatactgttatttctttttatctctctatttttagtttgttttgttacgaagctcgtgttcttatttatgtctttttacaatttaagaaaatactagtacataattgaggtaattcataaataaataaaatattaaatattaattaaaattgaggtaaaaataaattgatagcatcgtagttatgatttttaataatttaataattgctcttacgattaaaaaatgttgttttaacaacaacaaaaaaaaatcttataagtactaggtatagtttggaccgtacgagtcgtgctgagatttcccacggaagaaaagaatccgtttacagcacgcttcgaacctgaggatgacacgtaggatagttagtggagttgtgattcactctcagcaacagagcgtgtagattagaagagagaattttgaaagccaagtggggttggcagagaaaacctagtttgtgtattttgtgtaactaagtctaaaaccattttcagttagcaaatcgttcttagttgtttgttgctttcccattacttttccaaattccaagttccgattccgagtcttcaacacttcccttgttttttggtttttctgttccatttaggttgtggtaaaaaagtgaaagttagaaccatgataacaacagtatctttggcatccctatctggactgcattttatattattgcccgatctatctttgtcatatcagatttttttaatattactatcatactagtattaaataagagttttttttataaataaattttgatttgaattatgtttcacaacatattttaattttttttattaattaaaaaattcatttgattatttgataaatattttttagtaatttctcaataaattctgacacttttaaaacactgcttaaaataatatttttttaaatactagatttaaatttgtaactttttatattttcttctatttttatttttaatatatttatcaaattttctgtttatttttttaataaatcattacttcactaattttatcactaattttatcgaacatctataatttaataaaataactttttgactttcaacaaaattttcgattaattttatgaatcataaccttattagttttgtgacaaatgttttattataaatgtccttgaaaaattcgaacccttcccttcttcatttatcattctctaacccctagatcaaaccatatatctctgctattaaataagagttttgtatataactttcatgttaactatcattataaagtatctttaaaaaatagtactattagtttttttttcttataaattaagtcacattaattagtcactctataattttaattattctaatttgtcataataaaataactatcatttttaattttaaaattaacaaataatttaaaacaaataaaaataaataaattaacagttatcttgataatggagaagtggcatccttgtggtgcacacagatttgacaacttaaatgagaaccattattattggtccgttggtccgaaaataaattctctgaaaggatcaacataggtggatgagcaaagcactttggcacgtccttttctttctattgcatcgctataacagtttatgtcattctttattagaactacttttcaaaatcctcacatgaaatattctacaacatggcaatgccaaaaaggagtgcgattacaagatttattaagcatgggccaaattcaccgattcatcatacaacaaacattgacggaaaaggtgttgatgttgcccaaagaatcattcccgaatcggaatgaaagtaaaagaaaaaataaaaggggtcataatttggaatttgggtacaaaaataatgacttgctgataaaagccaataaagcaatgtatgttgtgcgcatttccttctttccttttggttgcaactttcatcttaacaatcagaaaaagaaaacactacaacatgttgaaaacaaagccataataaaattttacccataagctttaatggtcctcggtgaaatcattagctgccacgagaaaagaagcttcatatacgtcagaacttgcacatatcttttctaacacaagcaatgagtacccttcacagcggtaattctttttatgtttctgcaacacatgcaccaaagaatgaataagaaaattacatggtttattcctagctgagttgtaacaaaagtaaagtataaataaaaatactactttacctcattttaatcagaattgagatggtattttacatttgagtcagacagtgattaattagtctgccaaaaaagattattcagtttctgtggttgtgtgcaaaatcaaaccctgcagctgcaataaagaggtatggagtagatttagggaaaaatcaaaaaataaaaataattacagagaagccgagaaaaggagagaagggaaaggacaaccttaattgggagtgtgagagtaacagaatgtttacatcaccattggggctagaattccccagagcattgcccacctacaataacaatagtgggggaccaaactacggataagaataagtcatgcaagagatctcaaccaaaaactttattaggaaggaaggcacagtcaaatgcattgctgtcaagaaatctatgaactaaataatattccatgaacttatgaaaactgagtgccaaaaagtttgaaatgaatatagccaagaacagacaatctaagtatttttttttccatgaaatggatccccaatgctttaaccagttttatcaattacataaaacatgcttctaggaaaatgttatgtatttaaagatgagtatgtggagaatttgtagcatgtcttcaatgaattttttaattgtaggaagcatagcatacttggtgacaaagtagagtttgattcttttgtaaaatgtgaatgacattcaagcaagacagaaattaccttgtatcgtacactttgctacttcagattcttcaattggtcaggttgatcagacggaatatgcattattatagcattcatcagaagaaactcaaatcagtgtaactgtaaccgtgtgaatgaggcaacaactcttccacttcaatccttgaactggagcagctagagcattttttgattcggttacggctaacagactcaacttctgccagaaacatgctataaactggtctatgatctgagaatcttgactccccacgaacgtacgataattggcggaggcctcttccataccacaagatacgatcacaccttcatgaacaaagatttggattagattcacataaacaatgacatggtactagatccaaataatgaaggacatttcttatgataatggcattattcatatgtctcctctcttttccatttatgtattcattgatacaggtgattattagcataaaagaagaataccatgctggagttcttctcttttgttttgactgtctttcatcgcctgcatatctatctgaattgtttgaatacttgtatgtgggagggaaatatattttcccctcattccatccttcaaagactcgaccttgtctccgctctatatgtagctgaaagaagaagctatgaaatggttaggatgatattatatataatttaagaaaagaagctacactctaacaagttgtaaggaaagtatcatgcctggtcattctccaacagaaccttccaattatgcatctcaacaagagcctttgctgcacggtaagaaagggctatccggtaatttaaatcccccagccaaattattcgactacaccaattaaaccacaagtttaggtcttggccagggtaaaacttaagacttaggactgcattttatttagtttcacgatctctaagcatcagttgctagtaaagattcaaggaaaagagatgaagggcttactcatgatccagaattgtctgaggagaactctcatctcccatgtcttgaactcggggaaaccttgtctttctgagaatctccattacatctgaattcctccttagttcatcaccttccttttgtccagaagtcaaatgactacagatgaagcaaaagcttgtttggtgcaaagacatgctaattgatattgaaccctggaaaactaaagagaatgagaatgcggtctccaggttcacaataaactcttctcataaaaaaatatatacatcaaattaaaaaattaccttgtttccaagatatcccattaatcctctgccaacacaagacactttcatattgtgaacatcatctcttatatcacttttcacccaaactgttagaaatattccaaccatttgcttactagcaaccaaacagtatcttgactgtcctgtctgtctaaatctatcctccatagagaagcaacctctatatgtcattggtgaataatgtgttacaactggggagtcaccagggccattttcatcatccgaggaagcccatctataacaggggtcatagtcacttggcctgtgaccaaacatcattctatcacatacgctgagacgacgatcaaggcatgcttgtggtagtgacatgtcattgtccattctcatactatgactcaaggattggaatgaccggcgatggaagaaagaggtcgtcttctgcctcattgatccctcaaaatcagcatctaactctacaatagggtcagggagcggtgaagtagtgtggcattcaccgcttgttccaggaagactgtttagggtcttcctaataagagatagccactttctggcagggccattatcttctgtgcccaaaacattgccagcattgagaggtacaatttcttgaaacctgagtgcaagaaaagtcaaactagttcactcttgaactgtatatggtgaaaggagagaatatacaacacactatacaaatacaatgagaaatttacccaagaacatagatatcagcaggaggagaagagtgaagccaatcttccagactcaaataacttggaggagattttccagctacattccaagtggcagcaaagattctgtatgcaggagaaaagaataactcaatagaataataattattctgaatctgactacaccaataattaagcacaacaatgtacagtaacatgaagcatacctatagttatgcacatctgtaaccggagctgcatcacggtcaattctacctcgccgcattctatctgagtgtctcctctttgctctctctgcattaaaatataaattatctctccgagagacatagtaggagacaaaaacaagggggggaagcaaaaacagaaaatttctgaaatgtatcggtactgaacctgttttgcttctcttgatagtgtcttcctccctctgtgagcagttcctccactcttgattgacacctgaaaaagaaaaccataaagttaataaagtcacactctttccactgtaaattttatcaaaccacagaatgaatcaaacacacaaaccagaaaaaaaaattataacaaaagatgaaaaccaaggaaggaggaaaacaacgagctgaagagttcagatctttgctttttagttgcagactcgttcaaacaaaaactgttacacgaagacaacccaagttccagaagaagaagaagaatggaagtttgtttattattcagaacatagaaaacttatgagggcaagagaaatctgattcaaacaaaaccaatcctcatctttaattacaataaaatcatgagaaaattgaccaatcacctgcgtagaggacatcatctgcctgaaagtcctcgtttttgcttttaatgttgaaccacttcttgaccaacgttttgggccatgaaagcttcagagagaaaaaacaacaacagagagattaagcaatggcagaagcagaacacaaatgcaaaggaatctgaagggtagagccattcaaaccttgcttttcttcgagttgtcatctctcattgttgggacaacttcataaagccttctgaattaacaacagaaaacaacccaatccaataataacctttccttgttgaagagaagctcgagtataataataataaagacaagaggaagaggctcaggaccctaagaacatgggtttcgtttcactttaatttttggttctgtttattaaaagggaagaaaaagacataataacgggatggttgatcaaacatgaaagcactcactcggtaaatgggagaggataggaacacaacaaagtgggggaaacagggcactcctctgtttcttaggtaacgttgagggaacagaggaaatcccagtttgtcaccattttaggcaatgtggtacaaataaaaaaaaaaaaaacactcactcacatggtcgtgtttttggagaggatgaaaatccaagggaagaaagaaagcgcagatgggacaaccccccctgatatgttataagaactataagagattatgaggcacaatgtgctagtttgagagagagagagagagagattctctcttgcaaaaccaaaccaaacctcgttatgggtacagagcaaaatatcgaatttgaagggagggaataaagtgaagcaagcttcgctctctctcgaggccttttaccccaaatccaaggctaaaccaagcttaggaacttggagacactagagagaagcaatggttatattggtctctctcagacacacacacattttctatctaaaataaactaaaaatgtgcattttcactctactaacttaaagttaggtttgatcttattgtgccaaactccagcagtggtactagcaacagtatcacatcacttccttacattgtctttcttccagcagataaaaaagcggttaaagggagaaaagttaaagaggtggatgtaatgttgaggcttgctttgttttgttttccgtttaattttctcttgttttgtttattgtttgttggaatcatttgcattgcacaaatattccttttgactgtgactgtgtctatgcatatttgttgcatacattatatacttttgcatatattatatacttagtcactgtcgaacttgaaagtcgaaacgatccttttggatttaattttcctattttgacaaatatatacacacttttacatgcgtatgaaatcttgactttgtttatagttttttaagtgtacaaaagcctactagaagtgtggtttagctggtcacccaatatgaaaaagaaggaactactctaccactttgggtaaaataatagataatgtcattgacatgctattttattatatctttttattattaaataaattttaatttcatttcatttgcttatacttaaatttactattatttaataaaatttatctaataataaattatatattaaataaatactactatcgtttctctctacctaaaatataattagtgtataagccttcttatttttgcaaggctggaatcttggatggtatgtttggtgattgaaagaaaacaggaaaagtactcctgattacagggtcccaatttgcaatttggtttttgatgtcgtacaacataaaaatcaatgcctttgataaatttataacaagatttattttattttatttttgaaactattctagattggttcaagagctcattatcaactcagagtatgaaccaatctgttcacttagtttgtgatttgaacacttccaaaatcaaacgcctgcttcctgttacattgatcatgtcaaaattctagaatatgttggctctcgtgttgtctgcattacaggcacagttaaagaggttcatggagatcaatttgcatcacttaatagtagttcattaattcacaacatagctctataaatgcaagtcataacttcagttcagaatttgtgtgtgttttttctctcgcttaggttgccataattgataaaagatattcggaaaagacctcaaattttttttagtactaatatatttttaaaaaaaattattgtaaaattatatttgaaaataaattttaaataaaataatgataattttaataaactattttatgagtaaataaaatgcttcatttttaaatttgttttaggcttttcaagtccttaaactatccctaattttgtttaatgaataacttttcttaagaaaattttgttgtatttaagagttaattgactcattgaataatcttaaatgagtaaaattatttgtgattttaggtgaatttttattgacaatttaaacatgtcatacctaataatatttaaagtattcttatattttataatatttctaagagagagtttctttgtcgcctatatcatttgagagaaataatattattatatgaagaaaaaattaacaaataatttagacattatcatatgcataatatattattctagttgcattgctttttagtataactatttcaaatggagttagatttgactcaattccaattactagttaatggagaaaattgtcatgttttctaatattacttttaacatatttttaaattacataaaacatattaacaataacaatatattttagttttttttacaataataacaacgagaattaaacctaaattctcacatatatatatatatatatatatatatatatatatatatatatatatatatatatatatattatttaaaatcctccactaagtcgatcctaatgaataatatattgtagtgtcctaatgaattttgagttttgtttttaatcaattttggtgcctgttaaataaaattatttttagaaagaatatgttttaaaacatactactatttattttgagaacaagtttcatttgaataaatatataataaaattacttataattacaaataaaaataaataaatattaataatatctaaccatacaaaattatgcaggcacattaataattaagaaagtacaaataaaattattaaatttttatcttttaaataattaaaaaaattaataaaatatactaaatatcttttaaacacttattaagagtattatacataaatggcttaaatacattttttcctttaatttagaggttttttcattttcgatattgtaattttttttcttttcattttagttattgtaaaatatatatattattcctaaagtattttaaataaaatttttattgtttaaaacattttttaccgttaaaagtgttatcaaaacacttcaagaaaaaaaacaaaaaaaacatattttacaagaatcaaaatgtaaaaaaaatttacaaaatcaaaattaaaaaaacactaaattataaaaaccaaaaatatgtgtaactctccataaatttatcccttcaaaccacgttgaggcaaaattatcaaaacgttgcttgtctctcgacgtatgcttacggtgttcagggtacatagatcacaaccaaacaaatgatgtctgagggccaaaatgaagctttaaaccaaaaaatcccaaacatgcctttacagaaaagaaatttttaccaagacatggggtcttgtattaagtactttacatttgcacatggaatgcgttgatgtaatgtaagtattataagtttgctttgtgtgacgcgttgttcaatgaactagtggttcacacttcgcataaatataggatcttggtagaccactggggtgttcgtaaacctatttcatctcaaacaaatagtgagttgacacccattatgttatttactaacaaataaagagagagaaacaaaaatacagatataataaattttttaatatgataaaaatattaaataatatttaaaatattaaaatatttatataccattattcttaattttatcatccttcttaacccatgcgatctcattgggtattatgaaatgaagctatattttaatggattaagcaattaagtgctatcttgatggtctaatattagtaacgtggcacatatgggagatcgtgtctgcaattcctcatatcttaatattctcatttttcaacgatcttttcttttagcaatcaattatgttcaaattgctgaggtaacaggtaacttgtcggatttggtattcactattcaaaggaggagtggtcaaatatttatcggttttatattaaatattttaaattttatcaaattttgtaatgcattgtaaagattttatgcgcacaaattatataaactaaactgattcatatgatagtatatgatagtaagtactattaaattaatttttcaaaacaattattaaattaaatgattatatacagtaaaaaaaaattcaccaaaaaaaaatacagtaaatcttaatcatttattaatataaataattatgtgcatctactaaaaaaatgtcattataataatcgttgttagttaaactaatatttcaagaattaggaaggaaaagattattaaactaacaggttacgcaaagctcagcaaattttaggtcaatctcccactatttgtcgtataaacctaaatcttagccctccaattattcataagtcatcaagacttgtccagtggttgtcgcaaaacaaaccaaccatcgtattgtgttttagtggtctgaatggatagggaaaaaaatagaggggagaatgaataacagcgtgggaattcattagatgagtttctatagtgtcaaatcttaacagcctagcctaaattaattagcatgagattgttataatttaattagttagtagtattaaatatttagaagggaaattttatctttcaaaaggatttttatctatctaaaacaatattatctcttgttaaattaccataccagaatatatatagttaatagcaaaccagaaaatatatattaatagtctgtgatacaaatccctcaattttgagtttgcttaattcagttgttaattaagaatcattcgccagatactatgttccaaggcaggggaaaacatttcatttgggtttaaaggtcttaataatttacacttgttgaccgaaaaccacaaattgaatatgacagatgcaagatttctatgatttggttttatcccctcttcatacgctcacaattaagaacaaatggggtcccaatctaaacgtttacttcaatttggatattctaaaatgaatcgtgaaagtttgttgctgccttcagagttaaaaaaaaattggaatctgccatccaccagggagactatacttgtttatctctacgattcctaattaggtgtttttccttctcccttttatgagagattccatttccacacaaggacggatgcagaaaacataaaagggactcaaaaataaataattaaaattaaaatatatttttcttccttataaaattaataaagtttattttttattcttgaaatttattttgttactttttttatttgaagtcatgtttggatgactttggtatttgtctactgaaaattacttccctttctcttctcccacaccgtgctccttcctccgatcttgtctcaccccggcttccactagctcgcaacggcggcgccgtcgctctcagtcgccgcaaccaccgcttccgtcgcttggaacgatccttccactatcttcgctccctccgatgcttctcgtgccccattctgaacgtcctccgcaaacactcacctccgacatcaccaccagcagtcagatccaaacccaaaacgcccaaatccggttccaattacaattccctgtttctgggcatttggccatggacgatgatttttgctgggtcgattattccatttgattggggtgatctcactttgatgaactacaatgacttcacgtgaatagagatttttaacttcgattacaaaattagcaaaattcctttctttttgttttggaatatcccaccgttacggtgtggatttccttctctgcctctgattttttctatttggtatttgttatttttgtcaattgttttggtcttgttgatcgtccgttttcataggagtttcatgatttgttgctcataattgataatgtcacaataaatggagacatttggtcatataattcagtttttccttctttttttgtgtcacataatggatttatgttatgtctttgtttgtaggtttgagacatgagatttgctagtcagttatatttttgaggtacagacttttccaagagttgctataaattagagaaacatagaaatgaatgaatgtagtaataaatttgcacacattttcataattccttagaacagtttagatcttttcttctgcaaaatttgggtactgcataaggtttggcagtgcccatgaatgccacaacagctgaaccccccaactatatatctaattccataacatttcagctttgttcgagtatgaaagaggggtttaaaagataagattgtgcaaaaagatccattcttgctttttttttttcaatttgtgataatttttaaccgttttaattttttattcaatttttggtgatttttaattctcatgaattatataaatttataagaaaaaaataacaaaatgagtttggaatcatgcaaacttaacttcagacaatcattataattttataaaaacgaaaaatatattttaacttataattaattatattaactaataaatattgtcatatgatgagtattttaaagtattatatatatatatatatatatatatatatatataactataaaataaatttatattatattgacggtttaaatctgatgcaagtcttttgttttgacttacatgctccaattatgaatagatcttatcctttaatatttagttattcttttttaattctccataaatgtttataactaatgttaaaagagtccattttcaa

SEQ ID NO: 320 - DNA, 6071 bp, Glycine max; identical to SEQ ID NO: 264

SEQ ID NO: 321 - DNA, 4255 bp, Glycine max
acccacatttaatattgtaaatgtaaattatgggtacaatgactatacaaaaaaaaaaaaaaaaaaaaactcacacaaatcatgttatgcaaagtataaaaagaggtgctttattttttttccctctaaattataggtattcttgatcaaagataatcatgtgtgtgtggaaccaaattgtatagttaatatagtaaaagagttgtgtaatttgatttaatttatttttacaattcaaaattgaattgaaccacataaaaatttgaatttttaaagtcattaaaaaagacaacaaacttcgattattcattttttttaacccgtgttaaaactttggacaaaagaaaaaaatgaatattataaaaaattgtaaattttaaaggacaaagggcaaaaattggcttttatatatatatatatatatatatatatatatatatatatatatatatatatatatataataataataataataataataataataataacatcaagaaattttaaaggatgacctctatacatatttctcattaccgtgtcaaggtacaacacattatatatgtttagtaatcttaccatattatttcactagttaaataaggatgaattttggatgatgatgtcagtatctcaaattttggcttcaatagttagagttattaggtagaccgtagagattcgggtaagtagtctgcaaactttcattttcaataactttttaagtttcaatatttgatatttcattcgtaagaaacaaatattattatttggttgtgattttgttttcttttttaaaaaaggatagaattaccattactcaaacttttttccaaaaatacaccttatgattatgacaattatgaattaaatttttttagagaaaatggtgaaactaaaaaaattccccaatcaaggcaatagtaatattgagtttgaatggcaagcctagacttatcgctggaccaaaactttcctataaataccagggaagttcgtcccttttctcatcaaggccacaaactctgacttattttaatttgaactttaaagttttgttattttgtgcaatggcagcaaagagcaaaatcctagtcattggaggaacaggatacattggaaaattcatagttaaggcaagcgcagaaacaggacaccccacatttgtcttggttagagacaacaccctttctcatcctgaaaagtctaaacttgttgagagcttcaagagctttggagttactctgctttatgtatgtgcctttcatttacaatttattttttcttttcacaaaagaaaagaaaaatacatacagtactatttcaaatttcaatccaactttttttacatctctctgtgattttgtagggtgatcttactgatcatgacagccttgttaaggcaatcaagcaagttgatgttgtaatctccgcattaggtggacaacagatagatgatcaagtgaagatcatagcagcaataaaagaagctggaaacatcaaggtacgtacgtacatgcataacccttcttttacaaaagtactattaacttaatccctgcttcattttgtaaaacgtttccatatcagatattagtgcacaaggtattaaaaattgctcctaaacaccatcatcatcatcggcaagaaaatgataccgatatagacagaaatctcagcatggttgcaaatagcagtaagtcagtaaacaactgcaatggaacggtgtttcagcgacaacaagcacataaaaactctgggttttttttttcatatttaatcattttttagttacttattttttgcatatttttttttctctctattagatcaaatcaatttatccttattcgtaagatccgatactggaatttgctaattgcatgttttcacaacaaaaatcattttgtatattgttcatttatattatttaaaagagattagtttttatgtatatgacttttaaggtagttttttaatttaaacctccaaatatgattttgaaattaatttctttgatgatcagaggttcctcccgtctgaatttgggcttgacgtggaccatcacaatgcagttgaaccagtaagtagctttttcgagaaaaaagtgaaaatccggagggctattgaagctgaaagaattccatacacttacatcacttcaaatttatttgctggacacttcttacccaacctgctacaacaaaatgtcacaactcctccccgggataaggttgtcattctaggagatggaaacgtcaaaggtaacatacaatacatcaaattaatatattaccgttttttgaagattatcaattttctttaatagaggttattagtaagattaagtttctcatgtatagataagcgtacatgttacatttgttttagcatcttgatatagaccttcttgtatcagggaggcttttgattttctctaaatgcgtttattgttttatcattttgggtttaatataatttacatttttttaaaaaaatatattaccgctttttccaacaagtaaaagataatagacatgcagttcaattgaaattcttgtttcaggagtttatgttatcgaggaagatgttgccacttataccataaaagcagtggaagacccaagaaccttgaacaaaactgtgtacgtgagaccccctgccaatattttgaccttcaacgagctcgtgtccttgtgggagtacaagattaacagcacccttgacaaaatctacattcccgatgatcaacttcttaagagcatccagggttagtgtgtactttgtatactctcatttatgacttttttgcggtcacaaatgcaacttataagagtctttggtctccgttgtagtaattttttttatctgtgcagagtctcctttccctgacaatttcatgttagcattacgccactcatttctggtaaagggagattgtaactatgagattgacccttctttcggtgtggaagcttctaaactttattctgaggtgaaatacactactgtcgacaactatttgaatgcgtttgtctgaaatcaatggaatgcgttattattgccaataaactgcttcaccaaaaagtcaataaaaccatatagtagaatcttgtgtattgctcgagcatttgtaatttgtctttctctttaagtagttacctgttgttgtgttgtcgtcaaaagactcctctcatacttaaattgtactgttgttcttctaatacaagttctattacgattattcatttatttggtcactctgatttcattagattttttttagaagattaggtaatttttagatatgagaaaaataattatactataaaaagatttacaccatcttctaattggaaaactttggcttatttctggtaccaaaactataaatatcaggaaaattcatccattttccgattaaagcaacaaatcacagtgtataatactctactattaacttcggttgtcttaaactctttaattaatcataagagattaaaaagttaaattaaaataataaaaatattttaaaaaacaaaactatgtttcattaatattaaaataaaattatagcaaaataaattaacattgtttttttcacaatttttatttttaacttcctaattgatatcataacaaataaaaaaagaaataaaaatgacttatagaagaaataaaaaaattagtttttatcaccatactatcagtggttaaatagaagaaaataaaatactgcatagctaggttttgaagattcaaagggatttaatttggtagtgtaaagcaaccaagaatggtgctaacccgagtctagctgcatgaagaagtggggtctgggtgccaccttcattggctgcctcaagcctatgaattgagagactgagagctacttttgttacagatttttctcacaagtgcggaacttgttcttaaagtaagtgggaaactaatctccatacgaattaataggcaccggagtgaaatacaattcagctcaaatatttcgcaaaacaaaattgattctgtgattttaaataagtaacatccgttacaaaaatgagctatcggtttttaaatgataagtattctcattgtaaaaatgacttgtattaattagccataagcgtatgatctgcatataaggggctagatatgaagagatttaacaccataatcaaaaatcttaaagactcaagtttatgaatgtttcattcacctatgtgttcaactttctcattttcaatcaatg

SEQ ID NO: 322 - DNA, 8892 bp, Glycine max
tatgttaagttaaaagatatttatattttaaaaatgaatcaaaactcttaattattttgattagatgtaaataaatataaatgataaatattgtgtctgatatactatccgatcataatatgtattgatgcatctttatttttaaacaatacattcctaagacgatttaacataacatttaaataatacatttaagactttcatctaataatttgtgtttaagattttttaatgcaaaaaatattctcatagaatttgtatataagcaaataacataagaaggggggattaaattgtgtttttagaaatttaatttttttttcttaaaacaaataacatgtgttatcgtctaatgtaaaaagacctaaaacacttagagattaggctaagtaaaaaaaaaagttttatttgtgaaacaaaataaaatataaaatctaaaaacaaattatatatatttataacaaacaaaataaaaatattaatttaatattttttatttgatattattatattttatgttatcgaaattatatttgttaacttttttaagagcgatatggatggagtaattttttttttcaattaccaatttaacttgttgagggttcttgtcaatttaaatttaacatatatgcacattatttcttatcaatgacaacgcacaataaattaaatatggaaagaatcatacgcaaaaaataatttcaaactttaacaaatgttattcgatatttttttctaataactatttgaagtttttaaggtcagggacaaactgtgttaatttgagggtgcggggattgtgaaagtgcaggtccttcaagaagcgttcaacatggtcggtcaccttgtcatttcagacttcagatacagtcacgggttattttttttacaccattcaaattttttgatacccaacatatcgtaaaaaaaaattaattttatcattttttacgtataaccctatggattatgaattgccaatatgtaagcccataagcatatgaattgatatgagacttacggattcctatgaggcaaacgaattgactattttttcttctctgaaaaaaagagataaatacagtcagaactgtgttgggaacagaaagcaactttgttggcagataaccctgaaaatctctgaccactggcaacctcacgatcaccaaatcaacaattgaaacccaaaactacctttgaactcgcaagcaacctctccagttgatatgaaccatcgaaatggtaacatgcataaaaaacaaaacaaccacgtgaaccaaatccacatgttcagaacaaaacacacaaaacaaccccgctcccacctcacttgaaaaacctggaccgttcgcaaagacgactattggaatcagcatcagacgtttctacctcactccggcatgctcaaatgatagttttctctctccctcgatttcctacacactcgaatcttgcttctcttttgtactttgttttgtagaatttgcctttttttctcttttgtagttatagaagtttggcgatttaattggcgttaaacgaccccattttggttgcgtgttctcgcttctcaaggttagattttgagtggctttgttgccatttaagggtctgggtttatacttaaatttgtgggatacttgttaactggacgtgttaggatcgtggtgttcttgttcgaaaagagtttgatttggataatttgtgttagataatgcttgaggttggttgtttgggtttgatttgggttagtgtttgtatcaatttctggcctaaatgatttttactaagtaaatgttattgtaaggcttttatactgtatataaaattacaagtttatgtaatttattttaatattataatatttataaatccttgattcatcacggagattaatttctttcactatattcaatttcattgtaggaataatgttttagtctcattattatcattttttaaattataaatcattttcatataacttatgaaattaattacgaattaagaattaaaaaatttagcctatatttttttaataaaaatatacttatatatatatatatatatatatatatatatatatatatttataacaacattttttcccctcttgatttgatgtttacaacaacattaatgtaaaattgaattagaaaaaggaaagatatgagtaagaggcgagagaggcttgactgtttgagacttgcagagatctgtctccatcatattttgtaagctcctcttggatacaaagcaattcattgaacttgaccataggaataagaatattaaattacatttaatttaagcaacttgttctgctgctattcatttcttttctcttgtcttgcttttccatccatgtaagtttctcatccatagatattttatattctgctctccttctccgatgccttaattttcttaaggaatatcacatgtgtttaagagttaggcgttcgattcaatctaaggatagggatagtactaacctgtttatttttttatggaataaataactaacactgtttgttgttcttaattgacccaacccaagggcaagccttttatgctctaattggctgctgaggaagaccctactttgaactctctatctctgccttttcacaactttgttccatttttcatccacttcgccacgtttgcaatgctttttttgtacatagatggtgccgtgtttaatttatactccatgaaatacatgggccatgcttgatacattgttatcagttctgcatcacgtatttgactattttgtattgccttcttaggaactttgcatataaatgttcacaacattgttattgttgcaatttggtccttaattttctagcaatcatttcataatttatgtattgatttgatattgtaataaatctgttcataaccagatttgaataaaatctgaattatgaccattggtgatagactatttctaaatgggcagatgtttcactgtccatggggggcatgggcaccttcgtaaccaaagaaggacaccttcacaggagtaaggttagaaactaaatatccatggctgtccagttactttctaatttttctccctgattactgcagatttagtttcctcttcggcattaattctgcctatatatcagtggctgtgtcattcaaaaataataagagaaattaaatatttccttcgctattcttatagtcacaaataaggaaaacaaagcataacaagaggtcatctagaagctctgagcgagtatggtattattgccatgtatcctaagcctcaagaaattcttacatttggtaaagccaaggagattgaaagtttttggcagtgtataatacatgcagttatatggtgtatttggttggtgaggaatgattgcatctttatgcttcagaaattgtttttgaataagattgtcttctagcctctatctggttctcctgtggttcttttgagggagttttcatttatcatacggagagagactggagagctggacagctttgttgaatttttaatttgttttggaggatattttatcctccccttgtttcagtttgtcttctctcataaaatatcattttctattttaaaaaaaagacttgaaaagttttatatcgtataaccggtagtactctgtcatgaataaactatcgtaaaagcttaagctattgggtgaacttgaatgattttatattgcatctctgaaatgccccctcacacaatagccctttgggattaaaatgtggataatgcacacgcccatctatcttgcgctgaaatttatctttccattagaataattggggcaacattgatcgaattttagatcgatcacttgaccgtgcaggcttggataccatgttaggaaccaactatccccaaatgcttaagatgttaggttaagacatgaatggtttgttactacatctctaacttactgtctcattttgctgcctttgtttaattaggtcagttcaacattatagtttatgattttatagtacataactatcttattttaattcgattttcctcttttatctgtggttagaaacacatgccagggggaattgaatgacagaatgttctgacattaatattcatttgatagctgttttcattcgaatattattgttgttttcatctgttccattcccatctatctgatgcttaacttttccatcttttaatgtagttatgtgaaaaaggaaaaatcgcctgaggtggttcaaacactatggaatcctgcaattgtattgacccacaagtgccagctgatgacttattgatgaaataccaatatatctctgatttcttcattgcccttgcttatttctcaatccctttggagcttatctactttgttaagaaatcagcagtatttccatatagatgggtccttgttcagtttggtgctttcattgttttatgtggagcaacacatctaattaatttatggacatttagaattcattcaagaactgtggctgttgtaatgaccactgctaaggttttaactgctgtggtatcgtgtgcaactgccctcatgctggtacatattattcctgatttattaagtgttaaaactagggaattatttttgaagaacaaggctgcagagcttgatagagaaatgggcctgattcgcacacaagaagaaactggtcgacatgttaggatgttgactcatgagattagaagcactcttgatagacacacaatattgaaaacgactcttgttgaactgggtagaactttggcactagaggaatgtgcgttatggatgccaacacgaactggtttggagcttcaactctcttacacattgcgacagcagaacccagttggatacacagtacccattcatcttcctgttatcaatcaagtatttagtagcaacagggcagtaaaaatttcacctaattgtccagttgctagattacgaccttatgctggaaaatacatgcctggggcagtagtagctgttcgagttcctctcctacatctttctaatttccaaatatatgattggcctgaggtttcgacaagaagttatgctttgatggttttgatgcttccatcagatagtgctaggcaatggcatgtgcatgagttagaactggttgaggtagtcgctgaccaggttagcaattttccattttattcagctgcctttctagcaaatttcatttacatgttacatgtctttacgttagtcgctcccaattcttgtacatggatatatttgtcattcattactttttgggtaagtttctagattttggaatcgtggcaaagtgattttttttattatatatttttttgttattatctctaatagatgagcttaagttttttgatagattgtattcatgtatggttctctcaagttcaacatattatatttttatcacacaagagccatttgagcttgaagcatggacaatgcgcagacccaactactttgtgcctaatttttttattttatttttatcttaaatatgtttggacaacaaggattgaactctagaccactaggtcatagtatagggattctgatatcatgtgatgaaatcactctccaaaaacctttagcagttaagtgaatacacatgaacggttttatattatatttttaaattattttatagctaacccaacctaactaatgagaaaaagctggtggtggctgttgaattaattattaaatgatgtactatggcgtagtgaaacatttgacataaaaatatgtttgtgggaaccatcagtttttgtacttcattagtctatcaattgaatataccttcaaattacctatgacaattgtctcctgcattaggtagctgttgctctttcacatgctgcaatcttagaagagtcaatgagggcaagggatcagctcatggagcagaatgttgcattggatctagcaagaagagaagcagaaactgcaattcgtgctcgtaatgactttttggctgttatgaaccacgagatgagaactcccatgcatgcagttattgcactctcttcattactacaggaaacagatttgacggctgagcaacgtctgatggtggagacaatattgaaaagcagcaatttgttggctaccctcatcaatgacgttttggatctttcacggcttgaagatggcagtcttcaacttgaagcaacaacatttaacctccattctttgttcagagaggtgaaattttcatgctaaatcctgatatttaattatattagtctgacttcgagctgatgatctttagtttctttaaaagcttgatgttgatctgttatcctgattgcaggtccttaacttgattaagcctgttgcatctgttaaaaagttatcactcacttcacatatagcctcagatttgccaatgtatgccattggtgatgaaaaacgtctcatgcaaactattctgaatgttgttggtaatgctgtgaagttctcaaaagagggctgcatttccatctctgctttcgttgcaaagcctgaatcctttagagatgctagaattcctgactttcttccagtgctaagtgataaccacttttatttgcgagtacaggtttgtttcttcaagcttagttaacaaacttcttccttagggtattgtgttctctgttatctgactacaatgatggagtttaattttttacacatcataggtaaaagattcaggatcaggaattaatccacaagatatcccaaagatattcactaagtttgcacaaaaccaatcgttaacaacaagaaatcctgctggaagtggacttggcctggcaatttgtaggaggtactattttccgccttaaactaggacgtgaagcacagttatttattttctattccttggaatattgtaaaattggaatcaggttctttttagaattcctattcgagatttttctgttcattatgtactgttcttttaaattgtgagcaggtttgtaaatcttatggaaggacatatttgggttgaaagcgaaggtattggtaaaggatgtacagtcacttttattgtaaaacttggaatcccagaccgatcaaatgaatttaagctaccttttgtacctaaagtaccgggaaatcatggatctacaaactttgctgggctcaaagttcttgtcacggatgacaatgggtcggtcgcataggctttatttttgtaccttcagttctgatatatgtttctatatcatttacttactaagtaaaacattagaatttttggatatcatataaaagcaaacttaggttgattacttattactgatggtactgcagggttagcaggacagtaacaaagggacttcttatgcatttaggatgtgatgtaaccacagcaagctcaagtgaagaatgtctgcgtgttgtttctctggaacatgaagtggtcttcatggatgtttgtgcagggttagatggttatgaacttgcaatccgcatacatgaaaagtttactaaacatcaagatagaccactaatagttgctcttactggaaacaccaaaaaggtaacaaaagaaaactgtatgagggttggtatggatggccttatattgaaacctgtttctgttgacaaaatgaggggtgttttatcagaactattggagcgccgagttctgttcgaaactgtttaacctgttagattgttgtatatagctacatcaaatttggagaaacacaaacttatgaaaacatgaggcaattgacattaattttcatcctttttgcttttatgagatcccggcgaaaggaacaacgattgagtctacgttgttaaatcattttttatgaacagaagttcgtatatgttgtatattctgcatttttatagcagtctttcaatgtttttcaatggcggtaaaagtgcatttatactgtcctagattgttttgattaattgatttaagtttaattattttaatattactaaataaattaaattgttgtaaatcaagagagtttaatttaattggttgaacgtagtgtatgaattattataaattttttggtatttgtctatttcttagaagaaaaaaataattaacttgtgggatgcacaagaggatttaggccatgtgtacagtggtagctcctgcaaagactgagttgattttatccatacatgataggaactttcttatttttagttgtttttggcgggaaaagcctttgagttccataggttccacatgtaaggtgtcatggtcgtgtgggtttggatacccaattacttaaagtctagttgttactctaatttacaaatgagttctagtgctgattttactttttaagtttgatactctttagggtggctgtttttagcaggggtaaataggaaaaatccacatgacctttataatataactaatttttttaatcttaatgaattagttaatttaattttataaaagaactggatgcgatatcttttgcttgccttttgaaatctctaatttttcatgaatgcaaataactcaattagagtaactcccatccatatgcatagttatcataattttgtgggacttattatgtcacataaatttaaatactttacgtaaaaaaattactctatggttaagatttttaaagtgaatacttaacataattttgtgattctaccccacgtattaatactttttatattattttatttcaactcaaaatattattttatttgtattataatttaaattaaaataataaatgtaaaaaacataattttattactgtgcttgttcctaacttcgtagacttacataaattgataatcttggcctatattgattgctctaattacggatcatcaccatttttccgtttatgctttattagccaaacgggaagttaca

SEQ ID NO: 323 - DNA, 5791 bp, Glycine max
actacataacttgatcctcatgtttgccttcgaattaaagtagtcaatatggtcacattttttttccctcaaatatataaaagttaatctgaagaagatattaattattaccgttagatgtggccggggaaaaaaataaatttattaatataatggtttatgtcaaattaatataacataagtcagagaaaacactgttagaagaaagcgtttcacatcggttaagagacaattttttatgatggttattaatgatcgtcatgtggttatattaaaaggatggaatcaaagggaatagaacaatgcaagctgtaaaagagagaatagaacaagacggaacgttgtgttatgtctgatagaaacctctcacgtttctggcactaaactaattaaaagcacaaatgtgaaataaataggactgaacattacttctaattatatattgttaatgagaagagttgctagatgttgactcttccaaactcttactttcccactataaatggtgtgtcacaaatattggtccaagagcttaggcaccagtaactatttatagactattttttcatcaagaatacattacaagcctttactacaccacaataaaaaaatatattaattaataagaatttttcataaaaaattgcttcttaatatttttaaccagtgtcttaaatgcagtacttgttagcattttaattattctaaaattattcaagtctttacctacaggtctgaagtatatattggaatactattatttcatgatatttatagcaatgttatctaaaagaggaatatattttgctagaaattaagaaatcagaaacaccttctaccttgcgttacattccataaacagaaaagtgctagttaccgtttattacaaggcaatctccagtggctaaaatccatttgctattttggcaaatgcttaaacaagcaacgctcatatgaaagctcaaatgaaggtttattaaacagaagcctaacctaaggaacataaaccagacacacccaagagatctctttgaggtttctcatcaaacacctttagccaacaacaatggcacctttgaacaaagttcttttgctcctcaccttattgttccttgcggtggatgccaaatacaaaaacaagaaagacaagaagaacagtgtttttcataagattcccaaatttccaaaatttccagttcctatcattggaggtgaccagaaagttgttgtggatggtggtaataatgccattgccaagcccgattttgaaacaaacaacctagggcattgggagttgattaataagcagtcgggtgtatccgccatgcaaatcaatttgatgcccaataacaagatgcttgtatatgatgccaccgtttaccgtacctctagactcccatatccaaaagggatgccatgtgttcaatgggttgatgacaaccttaagcaaagcaaagaagattgttttgctcattcaatggaatacgatattgagactaatcaagttcgagcactcacggttagtgtcatctttatttcttcttttcacacattacaaaattaattagcttagtgttgtttaattaaaatgtgatgcatcatactagtagcatgatatactaataatgagtttaatcattatatattgtcaaccaattaaaatcataattgatataacttttaagttaattatcataaaaattaataaatttatcatatttatgattcgataaaaatataaaacacttttttatttgcatcacttcattttcagtcaatttcttttcatatgtttcttttcattttctattgtatcaagtatttatcacttttctccctcctcttttgtttttctctccatctctctcatccttccactcagccaaaaatgaaaggaaacctaatgtttaaccatgatgaagcatttttcttttttgtgacacgctttcaaattaaagggcacgagagttgattaaatgcatggcataatgtggaccttggtgcaggtaaagacagatccatggtgctcatgtggaggacttacacctgatggtaccctagttgttgctggtggttttgcagacggagggaaaacctccagatactatggcggtcaacctgattgccaagactgtgactggagggaataccccaataaattgcaagagcctagatggtacgtagatacagtatttatcactataatgttcatttaaatcttaaatcttgacaaaactgattaaatttaatctaattaacttagctaattaaagttttatttctaatgatttcaatttttgtttggaaactctaaatattccaaggatttggcttgcattttgaaacaccaattatatatagtttgcattattattatttttttcttttgtgtatatgctcgtacatggaaaaactcttaaatacatattatttatcacattatctcacttaggcactggaggcaaataacatgtataaatgcactttacactttaaattcaacattatatttaggtaacgtttcgtgacagataaaatggaatgataaatctttctctattccggtctctttaattccaccttcttcaataaaattatatataccatttttttttacctcatgcatacgttttattttaattttaaggaaaaattattttttgttattataagcgcacaaattttaccttttaatatttacacttacaaacaatcttttctaatccttactaaggagtttaagttagtttgtcgaataggtgtatgagttattgtaaattttttaatatttatctttaattgttatgaataaaaaaaaatttagatcttgtgtaaatattttcaaatcctttttttttgttgatattgttacacaaacattaccttttagtgtttgttattttataatggcaagagaccaaaagtatttgtgcaaaaagtaaaaatgatcatttttaagtttaaagattaaaagggtaaagtatgtgcaattataaggcataattttttctacttttaaaatatatcgaacatatatatatatatatatatataatattttcatccctttttaatatatctacccaatgctaccttggtattaagcaaacggcctacatattagttgtctaattaatcaagaatattagtttcatttcatgtatatgaaaaatagatcatacatatgataataccacaagcataatcatttcacttgagaagatgttagagtattagaccaatatgtctttcctacaaaaaccatgcattattgatttgttgttccactcttgtatatgctaggtatgctactcaagcaattcttgccaatggagagtatattgtgataggaggtcgtagatctttcagctatgagttctttccaaaggaagggcaacctagtgacaaacccatatttttcccattcctctatgaaacctcagacattgatgaaaacaatctttacccttttgtccacctttctagtgatggcaatctcttcatctttgccaacaaccgttccctcctcctcaaccctaccaccaacaaagtggtccgcacctaccccgtcctccccggtggttcccggaactacccggcttccggcatgtcttccatcctccctataaaactcgatggcactgagctaagtagtgcctccatcaaggtagaggtccttgtatgtggtggcaacagccatgatagtttcatcttagccgagactgaaaaaattttcaaaccagccatcaaagattgtagtagaatggtgatcacagaccctgaccctaaatgggacagtgaagagatgccttcagggagaaccatgggggattctcttgtcctccccaatggacaaatcttgttcatcaatggtgcacaaaagggtacagctgcatggtgggatgctgatgaacctaacttcacaccagtattgtatttctctgaaaaacctaagggtcaaaggtttaaggtgttgaaacctagccaaatagctagaatgtaccactcaacctcagcagtgcttcctagtggcaaaatttgggttggtggtagcaacacccatgatacttacaaggacaaggataggtttccaactgagactaggattgaggctttctctcctccttacttggacccaaaactagataaataccgaccccaaattgttgaggaatcttcagagaagaagctgatgtatggaaaaaactttgagacacaattcaaattgcaagacacgaaccagaaattgaccaagcaagacattaaggtctccatgtattttccacctttcaccactcatggctactctatgaaccaaaggttgttgtttcttaagactttcattgctcaaaactctgaagggacttacaaggttacgtccaaggcaccaactttccgagaggtggctcccccaggatattacttgctcttcattgtccatcgtggagttcctagcaagggaatgtgggtgcaaattgggtaggattattactagctcaatttcaaggcacacgtggagatctttgaacatgtttttattttagttttttttaatatctaggaaatcctcatttttgaagcacaaaaaatggaggaagagaaagtggtgttattatcgcacccttttctagtcatgtaaaagttaaatcattttagttcatgtacaaataattagtgtcagcttctacatgagaactatgtcatgtaagggggacttcttcgagtaaagaacatgatgcaaaagatgttttgatgaagtaaagtgaaaaatgataattttactttttaagattattcgttttagcattattgtatacaaggtgatgataagatttgaacttgttacctcatagaaattatccaaactacctaccattagtccaattttagtgagtacattttttcatattaacttgaaagtataattatttttgcattttatatattttcttttgaactagcaaaatatattggtgattaatttagtgtaatagcaacgaaagaataaaaaagaatagatacatagtgggctaatagataatgatgagaaaataaaataaaaatgaaacagattccttattagtcattttaattaacgtatgattatttcattaatttataaactcatttaatcaaaaacaaaaaaattatggcaaacaatattatctcaccatctcttgtggtattttttatatgttgtttgaatttataatttataattttttctcaattttatcctcaatattttaattaaaatctatcttctaatattatactatttattttaatttttattaaaatattttatcattaaataaaaataataagagttcaaaattaactaaaaaattgtaaaaatataattattttaaaacatatatatttttcttaaaaaatagaatttatataaatatataattaattttacgtcaccttatataattattagctaatttaactactaattttaccaaaaatcaactatatatatacgttaattaaggaagttggaagagtgaatatacgtgtgtaagtatatatgtaacaactagtcaactctatttttcatttgcccctctccatcccctttatatatatattcccccttaaattttacatcatataaaaaatattcttttatcttaaagaaagagctagcacaagtagtccaaaaaaaaacattattttcctcgatcaggggtgcacgaccttggtgatgaaccaacaatggtagccggtagctggatagtccattgcactagtcctaggcacgacactcatcatctctttc

SEQ ID NO: 324 - DNA, 7466 bp, Glycine max
atcttataattaaaaataaaaaataattttaattaatattataataattttaatgtaaaattatttgtatcatgtttacatgaatgtttggtttcgcgttcaatcacacgcataaaaaaaactcaaaaaatcaaaactatttagtagatcctcttctttgataatagagttttaaaaagatatcacatgaaatcaaatatattatacaattaaaaggataataaattttaatgaggtcattactaaatatttaaatttgtgcattcattcattacttatcaacttattatacatatatttatttattatatttatgaattttaatttttaaacataaaatattagattagaatcacgtaacaaaatataaggaggtatttgggttgactgttttctgctttttatatattagatcagaaaatgtgtttggttgaatttttgaaaatatttttaaacaaatttaaaaatacacttccttttaaaaatgtattttctgtatttttattttttaaaaatagaaaacaagaaatcaaatcaaatatgttttaagaattctaatattttaaaaataaaaatataaaccaatcgcaccctacaaatttttgaaagcaatgacggcttacatgttaacattcatgcctttgttaattgatatcacaataaaaaaattctttgaaaatattcaagagatatgatacatatataataatttatataatattatttatatgtttattttcttatcatattatttattatattttaatttttttactttttttttattttatctctttttattgtaagattgattacaagtataatttctctaacacaaaaataagtaaaatatcttagtaatgaatgtttttagaatattaattaagaagtcaaaagaataaatatttaataaaattatttttgttttaatctaagcggagggattaataaaaacaaaaaaattagctaagcagtagaagtcatcgtataccaaccatctgggagaagaaaacaaaaacatgattttttgcgccttggtccgcaatgtatcgatgatgttgtgtccccatcacaagttgattgtcagaataaaaacattaaattcatccaacattgggaagaagaaataactgagcagcaaagaaagcgagtaatcttttccgtgagatcggtgtgtgaattgtatattcccatttcaatgcagagatccggttatgggtccgacggaatatacaggtcactcagaccttccatcgtttttcccaaaaactcaaacctctcactcgtttcccatcttttcaacagagtcgcagcctttccatcaaaaccagctcttatcgatgcagactcttcagaaacactttctttcgcggaactcaaattgctaactgttagggtcgctcacggcctccttcgtctcggagtgaccaaaaacgacgtcgttctcttcctcgctcccaacgacatccgctacatcgtctgcttcctcgccgtcgcctctctcggcgctgccgtcaccaccgtcaaccccgcctacaccgccgccgaagtctccaaacaggccaacgactccaaacccaaacttttggtaaccgtcgccgaattgtgggacaaactcgaacacctcaaactccccgcggtcttcctacgttgttccaacgctccccacgcgccatccagcgcgactagcttcgacgcgctggttcaactcgccgggtcggtgaccgagtttcccgaaattaaaattaaacagagtgacactgcggcactgttgtattcttcgggtaccaccggcttgagcaagggcgtggttctcacgcacgggaacttcgtcgcggcgtcgttgatgattggcttcgacgatgatttggcaggggtgttgcatagcgtgttcctctgcgttttgcctatgtttcatgtttttggtttgatggtcatttcgtacggacagcttcagaggggtagtgcggttgtgtctctcaagaagtttgagtttgaattggttctgaagaccattgagaagtttaaggtgacgcatttgtgggttgtgcctccgattattcttgctctcgcgaaacacggtttggttgataagtatgatctttcgtctctcaagcatattggttctggcgctgctcctcttgggaaagagttgatgaaggagtgtgctaaacgttttcctcatgccattgtttctcaggtagtagacaatgtttgtggttgattagtgaggttttgattatagctattagctaaggcctaaggacttgtttggataaacttacgtgtaattacttgtagaaaaagaaaataacaagctaaaatgcattgagttcttatgaagttgattttaactaactgaagaagctcaatttattttattatgaacaagtttattcaatcagggcctaatgctttcaagttgaactatgatttttgtgttggttgttgtggtttcagggatatggtatgactgaaacttgtggaattgtttctgtggagaatgcaaggatgggaattcggaatagtggctctacgggaatgcttgtcgccggaatggaggctcaagtagttagtgtggatactctgaagcctctccctcctggacagttgggggagatatgggtacggggccctaatatgatgcaaggtacactgcatatgcacttcactgtagtgttcttttattatattgtttgattcctgtggtagttagtgattaagaaaagatgtatgttgtctgatgtggagggagaggttgtggtaacccttcattgaatgaaaattcagaggccagagtaattgtctcattttattgcatttgaaggttagatcattagtagtggaacttattccttaggctggacatgttatgtacatctggtttaatactgtgcttgaatctgcatgttctgcttttaggtgattcagcttgactaggtttagtctcagcagtatgtatacaactatacatttccctggctctttcttgtctataaaacactgatttattttaagtttggtggcacttgatattggcttgtagggataaatttggaagcagcatggattagaacaaaattagctctgtcataaccttaaacatgttagttgtatatgataacagaaaaaaggacatggtctggattctaaaatgtacattaagctgtttgccaacagactaccatcggttagtgttcttgttaggcttcacgaacatatcttttactttctcttccaaagaaactggtccacctagagataataattgagttggagctccattctctaaaagatactccctgcttcatgcatggaaaataattttttctgatgtcaaattgcatctgatcactaatttgtatgagtaattctaaactgtggtgtgagcatcattgtggtttgagtcttgaagttttcttctgattttctaactgggattgtacttcaggctctttgtttcacccagtgtttttcatttggatgtggatgttcaatatattttatgcgtgatattagataattcattattgataatggcagatttgtgctgaattacaagtgtgaactgcttcatagaatgttgccaacagaaactgtttctctttgggtgaaaagttatccagagaattggaaaatagtcctgcttagtgctttggctgcttccttcacgtttctgatcgttgcatttcctacttccttatattaggcacatttccactatttccagactgcggctttgatttcttcttctcaagatggttgtctctcttggttcgtttccctcggactattaaatcttcaccactcacagaaaccttttgcttatttctttcattcaatacctttgagttcagggctgattgaacctctaccagggacaaagattctctctcacacaagagagtttctttaaaatgagagaaagactttggtaaagcacacaatagtaacagggcctgatcttcatcatcaatagtcacatctatattttctagatcaagaatcagtttattgaagacatccagttgagattccacagttcagtcttcttgcatcttgaattaatataagacttgtttaagataaagacgatttaccagaggtttgatcatgtacaaaccttccagtttcgaccaaattccagctattgtcttctccttcgagacctgtcttagtaccttgtctccaagactcaagatgattgcactgtgagtcttatccatcaagatcttcttatccctttcctccagctttgcatcaagagcggtttcaccttgcaaagcttcttcaagaccctgatgaacaagcaatgctctcatcttcaatcgccattagccaaaatcatttgggcctatgaattttttaacctcatactttgcagatgccatgatttttcgttccacgctcaccgcaccaatttgttgtgaattttgagagaggagaatatgaagatcagagcaatgatggataaggcacgcagatctagttacgagccaacactacaacactgtttctttattgatgaatataaatccacattacaatcttgaaacaatctgtacaatgtaaagtctatttatagacaactagacttaactaacatttctaagaatagtaaacagttaatctgttagaaacagaattgaacaggtcagcataactgactggaccaaaacctccatgatgcttccatgttcttgtcttgaaaaagtgctgatatacgttatatgtgcgtatagtcagcaccggatgtactcattaattgagtgattcttttcttggagtatttggttattgccatagtagagccggtatacagagcatacaaagggccatgaatttaatttagtttgaaaaagataaaagctaagttattacttgaattagatttctgctgtgatgtatagaaatgtgggccaatgtttttatatgtcttttttttgtgatactgtgcatagggtctttagtttacttcgtatgcagtttggctttaaatattattccatagggtcttttcctatatgcaatttaataaaagttattacataaattttcaggttatcacaacaatccacaagccacaagattgactatggataaaaaagggtgggtacatacaggagatcttggatattttgatgaggatgggcaactttttgttgttgaccgaatcaaagaactgatcaagtataaaggttttcaggtatgaaatccaactgccatttcaagagtgaatgacaatttgtcgggcatgtcataaatgcatgcatggtcacatgtctgaattctcaatcaaatttttgaaagataatctggtactttggtgcattaaatatatcttaaaccccaaattgtattagaaagtcaagtttattaacttcggtgcataatgcttttgcttctctgcattgtttatttacgtgtgtttataaccttccagttattcttggtgatgaacatttttggcgaaggattttcaccgtactgaattattttctgtttccctcattgttccaactaggttgcgccggcagaacttgaagggcttctggtttctcatgctgaaatacttgatgctgttgtcatcccgtaagtttcacatacatgatcatcgttatttaatatgggtacagaagaaatacttatacaactcatgttattagtaattgaaattcatagttgacttcaattctgtagatatcctgatgctgaagctggtgaggttccagttgcctatgtcgttcgttcacccaatagttcactcacagaggaagatgttcaaaaatttattgctaagcaggtaagagaaaaataaacaatgagcttggtctgacttgcattcttggaattataagatctttggcttgtgaagaaacgaagcaaactaaatggggttctaaaaataaagtttagacattaaaaaaatgcatgttttcactgcaggtccattgatcacaattaaacgactttttgtgttgtttttgttgacactcattttttgtatttgtttgcaggtagcgcctttcaaaagaataagaagagtgacattcatcaatgctgttcctaagacagcatcaggaaaaattctccgaagagagcttattgagaaagtaagatccaaaatatgatgatatcatggtgtaatttttttgtgtgttttcaaaaccatttcggggtttaaattcagaagtagaatgcaagtccagagcgaatccggaaaggtatgatggttgtcatagtggatcaaatatgtatctggctgggaacagtacttactgttgggtctagcatatttcaatccattttataaatgggtcaattcattctagttcacttaaggttgaatctttaaaaaaatggtctgatgtgacctaccatggattggtgagataaacaggttgacccatcaatttacctagaattatttttttacttaaaaaaattcaacaaaaagttaatttttagaaaaataaaattttgaatagattagaaaatattaattaaattaaatctttaaccaaaatactagtaaataaaatttaattctaaaactttaaagtcttaaaataatattataaaatactaagtatattttggaggtgggttaggaagatcaactattcccatcacggttcaatgggcggaatcaaattcttcaaccaattgcaaagtatgtatcttttttgggcttgaccagacccaaaacctataatggatcagattaacatgtggatttgaatttgttttgaagtatcatatccggccatatcttatataaagtttagttacaccgccttctctgtatggcggtttgattttctagaatgtgcattttgtgtgctatagtgagctaaatagtactagtagttattatagttgctaggcgtaacttttagaaagttttgtagaaattgtgcagaattctagatgacacatgttactgggttctgtatgcagaggtccaatttcaaccccaccccccaactgaagctttactgcagttgctttatataaatgttatgagtgttcttagctcgtcgagccaaaagaattaggcaatatagtcttgtttcatgcgtaagcctgtttaaattaatagtgtgtttgtttgtgagaatcacatccaattttcaccaaggccgaagttactttgtattgtttcagattttcacatcttggatcctcgtttttgggtttggacacagatctaaacgtacacctactcatacatgtaaattggattgtcatatcatatcagttgaattagtagggcataattaatatactccgatccctcagaagtttatctcttttatcggtcttttagggagagggtattgggtgggagtgaatggggtttgagaagaagacaaaagaatagattccaaaactggaataatctcgaaaatgagatagagcttgatcaagttaattgaccacatgtgggtttaaattcgtcggct

SEQ ID NO: 325 - DNA, 4481 bp, Glycine max
taaagctacaataatgtcatttcatttattaaagttgcatttgttacattaaaataaatgctttttccattgatagcattagtgtgcaaagtgaattttgattagtattttttccctctaaaaaaaagattagtattttgttgagattaactattcacaacataagaatttatacaactaacagtaatatatttcttaagttataaaaattactttctttctaaataaataaagttttattttattatccaacaagtacttgagatctgaagatcgatcacgtcttttagaagggtggagcataaatacggctatccacttgacttgatataactactgattttgacaaggattgttcttcacttgcaaaaagattggatgaaattatattagagcatgttaaatggatattttgatttagtctttactactcttgcaaaacaacacatcagaaagtatatataaacagcagagcatgtgcatgtgaaaaagagcaaagaaaacataggacatattatgtaccaagaaataataatgagtaaagggacattaaccggaattaattttcaaagtcaaatataaattatagagtattaaacatagcatttccctatggtttgtaccaacttccttccaagtggctaatgtaatggtgaaggcataattcttgaatccgtggaatgattactaggattaagaaagaagagaaaaagaggcgcgtgagggaagaggtgattgtagaaaaggtggagcccaggatcattctgggtccccaagactctcaatcgatgaagcgtacgggcacctgattttctagtgtatggtgtctgctctatgcacgagctgtactctatcatgggcatctttcttcggattacggtgtggccacggctcttctctttcatgcccctgcccctgccccggaccttcattcttttaaaactaaaataacgtacacatgattaaattttttaaataactcactcactacaagtaaaaatatcacactcaacatccacacttttcacataaaggaaaaaagaaaaagaaataaagaattcgttccattattatggcctcccttgttccttatcttttccaatttccacccttctttctttctctctctccgtttcccctttagacctctctctcacttgaaactccacaaccccattttcctttcctatgaccctattccaaatcaccaattctaattccattcttcaggtgttcaattgaattcgtgatgaagagggatcaccgagatagctgcggcggcggcggcggagggagtgtgaagggtgagtgttcctcaatgccgtcgaacgggaaggcaaatatgtgggaggaacaacaacaacaacaacaggggatggacgagttgctggcggcgttggggtacaaggttcgtgcttccgacatggccgacgtggcacagaagctggagcagttggagatggtcatgggttgtgcccaggaagagggaatttcccacctcgcctccgacaccgtccactacgatcccacggatctttattcctgggtccaaaccatgttaaccgaactcaaccctgaacccaacaacaacaacaatagcctcctcggtccatcttctctcttaatcgacaacaacaccgcccctgttttcaacgacgattccgaatatgacctcagagccattcctggtattgcagcctaccctcctcctcctccacaagacaacaacaacaacaacaacaacctcgacgaaatcgaaacagctaacaacatcaacaagcgtctcaagccatctccagttgaatcagcagactccgcgtctgagcccacgcgcacggtgctgctcgttgaccatcaggaagccggcgtgcgtctggtccacactctcctggcgtgcgcggaggccgtccagcaggagaatctgaagctggccgacgcgctcgtcaagcacgtgggcatactcgcggcttctcaagccggcgccatgaggaaggtggcttcctacttcgcccaagccctcgcgcgtcgtatctacggaatcttcccggaagaaaccctcgactcctccttctccgacgttctccacatgcacttctacgagtcctgcccttacctcaaattcgcgcacttcaccgcgaatcaggctatcctcgaagcatttgccactgctgggagagtccacgtcatcgatttcggcctcagacaagggatgcagtggcctgcactcatgcaagcccttgcattgcggcccggcgggcccccgactttccgtctaaccggaatcggcccgccgcagcccgacaacaccgacgcgctgcagcaagtgggctggaaattagcccaattggcccagaacatcggcgtccagttcgaattccgcggcttcgtttgcaacagcctcgcggatctcgacccgaaaatgctcgagatccgacccggagaagccgtcgctgtcaactcggttttcgagctccatcgtatgctggcccgccccggatccgtcgacaaggtcttggacactgttaagaaaatcaagccgaagattgtcaccatcgtggaacaagaagcgaaccacaacggaccgggttttcttgaccggttcactgaggccttgcattactactccagcctattcgactcgctggagggttcgtcctcttcgaccgggttgggctcaccaaatcaggatctgttaatgtccgagttgtacctggggagacaaatatgcaacgtggtggctaacgagggcgcggaccgggtagagcgtcacgagactttgagtcagtggagggggagattggactcggccgggttcgacccggttcatctcgggtccaacgcgttcaagcaagcgagtatgctacttgctctattcgcaggcggtgacggctatagggttgaggagaataacggctgcctcatgcttggctggcacactcggccactcatcgctacctccgcctggaagcttccctccccgaacgacttgcactgtaaactgtagattaattggctcctggatgggtggtaaataataaaaaatggtttggttgaacttgttcgagtggagtgaatcaatgacccagtgagtcagtgagtcagtgagcgagccagcgaggcagcaagaggataaataaatgagagggtaaaaaaacaaaaaagtaaaaaagaaaaacaaaagactgtaatttgtaattgtgctctcgtaattaccgtttctcctctttagtgtttttttttcctttctctaaattattatataatttgtttaattcttaattatgatgtctttttctttttaatctttatcttaatcatgtgttgtgacttgtgagattgattaacttgaattaactggttcaccgttgttggagggggagggtctggtcctgtcgaggaaattgattgtgtttctagcttttgttgtctgagtttttaataaatgaatgaaagaggtggtgtaattttagtcttgtcaaaactttttgttaatacgttgtttcttttgatgaataagaaagaaaccttgcatttcgctgtgttttctgtgattttaattgttcctcttcagtgaatgatttctatgaatgcgatcatttgtggataaagggggaagatgaaagcattttgatttggaaaatgaaagtgatgggatgattattctttgggtattaatttctatgtatgagaatttttgttttgcgtttattttcatttttccttttagagcacatgataagaccatatgatcgaaaatattcggaatttttttctgccaacactgaatttccatccaatgtacccgaaaagaaaatttcattcaagagttttacctaacggattttattgtaagtaaatttgcacgccacttaggtgaagtcaaatgattgttatgatccaaatgctttgattgaaagtaacatagaaaagcaatgtaaattatttaaggttaattttaatttccaatctcagtccatgaagttcacatattcaagcctaaaaagatattctaatcaatgccataaagacaggctgctcttgttattcttttaaatattttacctgtttcatctattgtaaaaggtattgagaattcaccacatgaccctaattatggatagtcatccttattttaaccgggttatatgcggaaagaagcaaatgtataagtcttctgagaaagaaaaaaaaaaatctacagccactaagagggcctcatgtctcaagtgtatccaaagagggtttttcaatcgctacgattaccttttaggttgagtaaaatcactagtttcctgtaatatgaaaataaagttcgattttatgttgagaaaagcacctaaatttactttttatgttattaacatgatggtctccgaggtatgcaaatcatcttcggttcagagcaaaagtaaattttcatttcttagattaaaagaaatggatacctacattttgttatggacgtacgtaaaagtgattta

SEQ ID NO: 326 - DNA, 17432 bp, Glycine max
ccataatttattgaaatgctatctctgcttatatgcgtcaatataaacaaataaaaataaagtcctaacggagtaaccctagttacaattttatccatacaaagaatgacaatgacaacctctttttttttttttcttctttttgacagaagtagtgcaagaaattatttcttatattatcgtatatgttattaaacagtgctaatctttttccatcaccatctttcgttatttatacactactaatgaccattaaaatattaaatttatagtttggtagaaaaaaaaatagacaaatgtaaattcgtctcatttgaaggcaaacacgtgcaataaacgtactaaatgttattttttaatctgagtttagtttttaatatattatgtaaattaacaatcgttttaaatctaattaaaaataattattataaaatgataatttacaattagataattagatgaccgaatacagtacattttaattgatttttcttatttggtaaatgtagtcatatggtattcattaagatagaaattggatgcaatttctcatattttctttatgctaatattatttaattaaaatcagagtttcaccttggaaactttgctcatatttagttaatataaatattaaaaaagagaaaataaattatgtattacaaatataaaataattttatatcatcatttaattacaacttatcatatataataaatttattaatttttatgataattacttcaaaaatcatataaataatgatttgtgattaaataaagaaaataatttttttaataaataagaaaaagaaaaaaatgaaaggaaatttttgtagccttaaaaaatggattgttatttattaattataactcgaattaacatgatgatatctggatgtggaaacagacagttttaaataaaataatagtaaaaagggatacaagtaggagatggtggctgctgtgtttgtttgtttgatgaaataggaggaagcatcgcttcccatatttgactcatctactactgattataaggaagaagggttggtggacaaacatcaccacccaacaaaacaaaacaaaacaacgcatagtcaatagaggcaccttattctacatgcttatatgtatgttattgttatgtgatgcattgatgacgtgacatgctcctcctcctcctaccttagccaaaccccccaaattctttgaaccatttttactactacaactacaagtaatttattcattctcaccacccactaagagagagagagtgaaaggggtagctgggaactactacttactacttctaccgagagaggtgtggcagaagcaggtaccacgtgcagctttcattgaagaaagagagtgatccaacactccaacaggtcccaacccaataccaacaccaaacctacctcactcaccccatccatcaaacccttttggtttggttttttgcatgatcatcatcactgattgatcatcaccatttacatggactaacccaacaactcacctctcaattataattcaccttcttaggctcccaatgcttctccaactcccaccaatttgctagaataaaattcaaaacaacaaaaacagattcttgatttcgtccccacagctttcttcccaaggtctgtgcttgtttgtgactgtttctcctccttattctatctgtgttcctttgtttgattcattctcttatcttcatttttgtatttttattttattttttacaaccccttttactgaaatgttcaaaaggtagctgagttctatgttgttcgtgagtttaaggaaaagtctttgatgcccttttgtttagaattggttttggtgtggaggctccgatagaaaaaaatgtctttttggctaaatcggaagttagaggggctaattgattgaaaaggtagcgtgttataatgagatgctgaccttttttgtttttgtaattgatgttttcgccataccgaaactaagagtgagagagagtgaactgctaggctgtgtttgtctgtttgtatcttacagtgaaaactgcaggcttgggaggaatgggtttgtaatagaattttacgggtgaaatcctgatttgccaaaatgagttaaccatttgtggttgaccaaatctggagttacttatcaagtccatatgtggttggccaaacagaacttaacaacttttttttatctgtctattttcttttacttcatgtcaatcttgccagtaaaagtttagatggattttgtactgcttaattatatgctttatcttgagtttcgtctatatataataattaataagctgaacaaatgattcttcaaaaagtttccagaattccgttactgaacaagcaatataaattgaaaaaagaatcctaattcctaattgattctcatatgtcttgagctgctggtaatctattttttattgtgctgtacataggagacttattgaaggagcgcaataatggctgacattgggcgtaggaatggatatgcaaacagtgtactaccaaataggccacctgctgcaatatctgaagtagatgaattctgcaatgcccttggtggaaacaggccaattcatagtatattaattgcaaataatggaatggcagcagtcaagtttatacgtagtgttaggagctgggcctatgagacatttggctcagagaaagccatcttgttggttgccatggctactccagaggacatgagaatcaatgcagaacatatcagaatagctgatcaatttgtggaagtacctggtgggaccaataacaataactatgccaacgtgcagcttattcttgaggtgtgatctgttgactttatgagattttatacttcaagtaattgtgatagcagtttttgttaagcaaagttgaaagcgacaaagtatggatggaaattatacctggaaatgttcatttatatttttctgcttgttataaatgttcatcgagaagaaacataacgctatccccctcccatgacatgaaatattcattcgataaaaaaatgtattgcataatttgttcctgttgccaaatatcttttttgtttcctatagttcaattcagtttgttcttgtcattgtagattttagtgcttatgtagtaatgattcttttgacctatataacttatataatctgcttactggcatgcaatgtactgcccagatggctgagataactcatgttgatgcggtgtggcctggttggggtcatgcatcagaaaatcctgagcttccagatgcattaaaagcaaaaggaattgtatttcttggacctcctgctatatctatggctgcattgggggataaaattggttcatcattgattgctcaagcagcggaagtgcctacccttccatggagtggttctcatgtaaatttccatctcccattttagtgcctttcttttttaagggataccagctcatgacgttgaagtttcttcttacaggtgaaaattccgcctgaaagttccttgattactattcctgatgaaatttatcgggaagcatgtgtttatacaacagaggaagcagtggcaagttgtcaagttgtaggataccctgcaatgatcaaggcatcttggggtggtggtggtaaaggaataagaaaggtttgcttcttgcataatcaatactgtagcatttagaaaatcctatagcattcatgctgttaatcttgtaagctaattttgtcttccatgagtatgttaattgttttcaaattgaaaactgcataaatacctataagaacaagaaactttgtgccaatcttattttggtatgatttgtttggcaaagtttagaaactaataggcatatggattttttaggttcataatgatgatgaggtaagggcattgttcaagcaagttcaaggtgaagttccgggttcacccatatttataatgaaggttgcatcccaggttagataatccactgatctatgatctgaatgaacatgattcttggagtcatggtcgtattctgattatctattttgtttctaagtagagccgacatctagaagtccagttactttgtgatcagtacggaaatgtcgcagctttgcatagccgtgattgcagtgttcaaaggaggcaccaaaaggtacaaaaacattttgttgccacaccaaatttccatggtgaaatgagtctcatgaatgacctaatcaattgtctgtaacagattattgaggaggggcccattactgtagcacccatagaaacagtgaaaaaactggaacaggccgctagaaggttggctatatctgtaaattatgttggggcggctactgttgagtatctttatagtatggaaactggcgagtactactttttagagttgaaccctcggctacaggtaactactgttgactagatcggttctatctttattgtatgttataaccttggttttgacctacatcacaattattttgttatctcttgtaacttattctccttttgacttttgttctccatttgattatgatcaatatgccagtattttattctaaaacggacatggaagtgagtattgcgtttttatgataacacttagaatttttatggtaacaggcatttgagcctagtaattatgtttgggaaatgcttctgtatatttttggagattttgtatggatggtggtggtgcttgaaatcagctcttcccgttttccagaccctgttttgtttttttatgttatttcatttttcctttatttttgacaacatcagtgattgttttgctatattgattgttatataggttgaacatcctgttactgagtggatagcagagataaatctgccagcagcacaagttgccattgggatgggtgttcctctctggcaaattcctggtactacttcagatatactctttatgctaaattgttcacttgattcctataattgtccccattttaagttttagtccctgtacaaggaagttgtaagttttagtccctacacatgcataaaagtttaagttttggccattgttgctaacattggagaattttttggcagtgtgaaactgctacaaaaacttccttacagtgataaatcgccacaaaaattaaaatgtgggcaactgtagggaccaaatgaatagtgtaacctattctttactattatttactttcttcttgtttgctatttgatttgatttcttacatgtatttcatgtgtctcatttaatagagataaggcgtttctatggggtggaacatggtggagggtatgatgcttggagaaaaacatccgttttagctaccccttttgattttgacaaagcacaatctacaaggccaaaaggtcattgtgtggctgtgcgagtaactagtgaggaccctgatgatggttttaagcctacaagtggcaaagtgcaggttaactacaagtccaacagcaatatcatcttttacttcattcatccagtaacttgtactgagttcaagtatttgtgcaggagcttaactttaaaagcaagccaaatgtgtgggcgtacttctctgtcaaggtaagtcttctgttcttcaatgcaggcatagattaaatgttggggtgctaaatttttttggactatttgcagtctggaggaggaattcatgaattctcagattcacagtttggtaagtagtaactattaattaattaaacaaataatattgattttcaaatgctcaatatatcattttgatcttcaattgggaaattgcagattccataatatcatgttgatattgttggaatatccacaatgcctgcctcaattcctgggtgcaacttatatatctgttggaaagttcacttaatgccacttggttttaaggtggaatttaacatggtactagagcctatagcccatcattgtgaataacctattccggtaggcatcacctattctggcaggcatttatggaggggggtgttagaaagtcctacatcgcctgtctcaattcttggggtgcaacttatatactagttggacaacttcactaattggttttaagatggaagctaatgtgtataggtcttttttttcagttttacctagtgcatattctttcagtgcataatgagcaatacatcttgccttgggcaatatgattaatgtttgcaagagctaggatgtacagttgggtttggtgggaggttgcaaaaacggaaatttaaatgcattagtcaataggatttttttaatgaatatgagatatagtaaatacaggtactagttgatttgcatggatatgtgtgcatgtgcatttgcttgtgtatgtaaaattgttcttcataggtttccacacatttaaagcagctgcattgttgataatagtgatcaataatttttcctcttgtgacaatgatttcttaacatgcaatggctgtgtaattgacaattcatattcattgcctttttatgttggttgtcatacttataactgtaatagtggtattaaatggactatgtatctccagtaggtatataaggtgtaacagcatttgatgtatttactcgtaattgtacaactttcttttcctgtgttatatagggatctttctctctatgaataaaacaaaaagaaacatattgagtggcgttgtataaattgtgggggtggagaaggaaaaaggttatgggaatggagaggagtcttttagatcacaggagctagggaatagggatgattattattgtgactagggagaaaaaaaagcaaaatatcatgtccactcaaggatttcccagaattagtgagagcttctgataatgatttagaaatattgattcttgtgttaagtaatttatataacaaacttcactattggggaatttttaactgtagggtatcaattctccgtaacattctttcttgtccttatattcatgtatttacacaattcccttacgataactcaccttatattagctttaatatcgtatctttttacctcagggcatgtttttgcttttggagaatctagggctttagcaattgcaaatatggttctggggctgaaggagattcagattcggggagaaatccgtaccaatgttgattacaccattgatcttctgaatgtaaattactcacatggtgacaaattattttataaaagttgtttaacatgctgaattgacattaccacaatattttatctcaggcttcagactacagagaaaacaaaattcacacaggttggctggacagtagaattgcaatgcgggttagagcagaaaggcctgcctggtatctttcggtcgttggaggggcactctatgtaagcaacttgttttttatattcttttctcttggacttttgctagtttcatatggtggaattcatgacctgcgcttcttccaattaatacagaaagcttctgctagcagtgcagctttggtttcagattatgttggttatcttgaaaagggacaaatccctcccaaggtatcgtgtctaaatgggaagaccatatagttctactatgcatttgaaccttattgtctagtgattctaatttagtttataattatgacagcacatatctcttgtccattctcaagtgtccttgaacattgaaggaagcaaatatacggtatttattcttacaaattttaatttgatgggcactttctgttgtctccttacctttgttgagacttatgctgccatcattggcaataatcaatttgtgtaattcatgtcttgtaaaactatttctagattgacatgatacgaggtgggtctggaagttatagattgagaatgaatcaatcagagatagaagcagaaatacatactttacgtgatggaggtttgctaatgcaggcaagtatttgttctctaaacaacctatgtgtgtttttttattttgtagttttgcccataacagtactattcatcatagtcaacattatgcttatctaaaaaaaaaaaaaaaaatcatagtcaacattatggcattccatggtttgtgaacattttgcgttactatttcattcatcattagattctctgttatagacataaactatttctgttctgacttctaaaattttactatcatgattaaatcgtttagcataaactgtttttggatgtattgtgcttctccatctgagaaaatgttatgcatgaaaagtacttcctgtttctagagatgttcaaactttttttgtgccaaaccttggaaaggaatgtgggtatttcagtacagatgatttatgcattatttaatgattccatcattttatcacagttcagactctgatcaaaccatatatggagagagatttattaaagcatttgataattctttagtatggatagtctgtggttggtcagtctagatagaaatgatgtgtgcctaaagtgcatctttttaattcatgctagttataaacttgaatattattgtgctgcatctataactttattccaatttagctaacacagtggtattttatcgataacatcactattttataactggtctgttgttctatatctgattcttgagttattaactagcagttgccaattgttacagttggatggaaacagtcatgtaatatatgcagaggaagaagcagctggaactcgccttctaatagatggaaggacttgcttgcttcaggtgaaatgagttcagttttaccttaactatttcttttgtggctgaggtaagtttctaaacctctctttttttttttatgcagaatgatcatgatccatcaaagttggttgcggagacaccatgcaagcttctgagatatttggttgcagatgacagtcatgttgatgctgacacaccatatgctgaagttgaggtcatgaaaatgtgcatgcctcttctttcgcctgcttctgggattattcatttcaaaatgtctgaaggtcaagcaatgcaggtatatagcattctattccacattggaagtacaggtgttcatattgaaagagataataaaatagtatcactgtttgcaggctggtgaacttatagcaaggcttgatctggatgatccttcagctgtaagaaaggcagaacccttcactgggagcttcccagttctgggacctcctactgcaatttctggtaaagttcatcagaaatgcgctgcaagcttaaatgccgcacggatgattctctctgggtatgagcacaatattgatgaagtgagtaaattcttcgccttggttcattaacattgtaattttacagcattcgtaagtggttgagtcatccgttattgataggagatttttggtttctattattattattattatgagacaatatgcttgccttattaacaagatatacaactatctcaggttgtgcaaagtttgcttaattgccttgatagtcctgaattgcctttccttcaatggcaagagtgcttggcagttcttgcaacccgtcttcccaaagagctaaaaaatgaggtaaagggataccctgccacctttttttctctggtttaatatcttaaaagtaatctgagctggtgttgaactatgtggtttttcagttggaatcaaaatataaggagtttgaggggatttcaagctcccaaattgttgatttccctgccaaattattgaagggaattattgaagtgagttgctttccctgaatttctcattctggtcttttcccttctaatgttaataatttatggggcatgttttacactgcaggctcatctttcctcctgtcccgacaaagaaaaaggagctcaagaaagactagttgaacctctattgagtcttgttaagtcttatgagggtggaagagagagccatgcccatataattgttcaatccctatttgatgagtatctttctgttgaagaattatttagcgataatattcaggttattatgattattcaactgcttgtactaatattatgtgggtaaatctgttatgaccttttatgatttctaccctccaaagtagttttttaatgggtgatgttaaaacttacaagaatctttgatacattgattttctgcattactatttctggtttttacaagattctgatagatcattatatattttttctttctctaaatcaaatgatttctttattgtcttggggtggtgtatataaaaactgatcaacacattttagttttctttttttgcctgttcattccaatgtacaaatgattggtttatgatgcaacaaaatctaaatcaggaactaaatagctcttttaatataaaagatgttttctttatcttttagttttctagaatattcatgtccctttcccttgatgtctaggctgatgtgattgaacgtctgcgtctacaatacaagaaagatctattgaagattgttgatatagtgctctctcatcaggtatgaaattttataacatgttctgttgggtgttttgcttcctggatatcttgttgacattatactgcaattagattaactgcattttgtgattttcagggaatcaagagtaaaaataagctgatcttgcaactgatggataaattggtttaccctaaccctgttgcctatagggatcagttaatccgtttctctttactcaaccatacaaattattctgaggttggacattaccctgagaaattgagttccaagttatattttttggacataccatttcttctactgggagagcattgtgaatatatatccttcaattatctacttttggtttcatcttgtggatgatacttttacatctttggaacattttgagtgaaatcctgatttaaaattttcttgatgcagttggctctaaaggcaagtcaactgctggaacaaactaaattaagtgaacttcgatccaacattgctagaagtctttccgaattagagatgttcacagaggatggtgaaaatattgatacacccaagaggaagagtgccattaatgaccgaatggaggaccttgtgagtgctccttttgcagttgaagatgctctcgtgggtttatttgatcacagtgatcacacccttcagaggagggttgtggaaagttatatacgtaggctctatcaggtatatcagttttatggccagttcatacttttttccaactgtgttttatttttccttgggaggtggtgatggaaggggattatcacgtacttttctaacttctaatattctctatcagccatatcttgtcaaagggagtgccaggatgcaatggcacagatctggtcttattgctacatgggagttctatgatgagtacattgaaaggaagaatggggttgaagaccaaagtttgagtaaaacagtggaggagaaacatagtgagaaaaagtggggagtgatggttataattaaatctcttcaatttttgcctgcaattatcactgctgcattgagggaggcaaccaacaaccctcacgaagcacttacaagtggttctgtggaaccagttaactatggtaatatgatgcatattggattagtgggcatcaacaaccagatgagtttactgcaagacaggtaaagtttcagtaactcctcatattagtttgaactttttttccccaaattgtggaagaactgatggcttaatagcttacattttatttgagatttatagagtagttctagtcttttagctattggttagatgatttaggatcaatatgggaccaataaaattaaaaaatttgttttctagaagaaaactaagtgtccggtgactaatatgctttttgtcgagctactgatctgaacctccttcctcttcttgacaagcaatctttggtgttttgcagtggtgatgaggatcaagctcaagaaagaatcaataagttagctaaaatactcaaagagcaggaagtaggctccaccatacgagctgcaggtgtcggtgtaatcagctgtatcatacaaagggatgaagggcgtgccccaatgaggcactcctttcactggtcagaagaaaagctttactatgcggaggaacctctgttgcgtcatctggaacctccgctatccatttatcttgaattggtaagttatttttttcaagtccctttactttatcaagtggaaaaagcaaattccatttatatgcttgatcttaaactcaaacatttgtctgattataggacaaacttaaagcctatgagaatatacggtatactccatctcgagatcgtcaatggcacctctacacagttgtggatcacaagccacaaccaattcaaagaatgtttcttcgaacacttgtaagacagccgacaacaaatgaaggattttcttcatatcaaaggctggatgcagaaacatctcgtacccaattggccatgtcctttacttcaaggagcatttttaggtctttgatggctgcaatggaggagttggaacttaatgcacacaatgtcaatatcaaatctgaacatgctcatatgtacctatatatcatacgcgaacaacaaatagatgatcttgtgccctatcccaagtaattatggctacaaatttgtccatatatattcttttagcatatgaccaagaagcatttgtatttgtcttacattttggatgttaattccaggagaattaacatagaagctgggaaagaagaaataacagttgaggcagtcttggaagaactggcacgggaaatccattcatctgttggtgtaagaatgcatagattaggggttgttgtgtgggaaatcaagctctggatggcagcctgtggacaggcaaatggtgcttggagggtcattgtaaacaatgtgactggtcatacatgcactgtacatgtaagtctttatttacttggaaatttcaaggaaatcttttctgcatgccacaacttttccattcagctttctaaaaggtttcttttgacaagaaaagtaggtgtgagacccttataagcatcaacaataaacacttctggggaaaactctttgtctaagaaacagaagattggttatgctaataattaggaaggagcatttttctatatatttgatagagaaatgctaatctgcatcaagtgcaaataccatactccatacctttaaagtatttactatcatgaagcatttcataaatacagatcatgtgaattcatttatttgagtttcttgagaagacctgtgatgaaaccttttgattgataaggctctttgggcagggaaaaaagtcaaaagagtgatttctttttgatcaagtggaatgctactctcttttcttgatatctttaaaatttgtttagtattcacaaagtgtgacctttaagaagttaaaaaatataaacaaggacagtggtgatcttcagtttgtacaagtgaacaatatattatcattgatagctatatctcaccttctgtatcgagaggattattaatggggactatttgtaatgattcgattcttaattgtataatttcagctataccgagaaaaggaggataccatcactcataaagtggtatacagttcagtatcggttaagggtccactgcatggtgtggcagtgaatgaaaattatcaacctttaggagttattgaccgaaagcgtctttcagcaagaaagaacagcaccacatactgctatgattttcctcttgtaagttctatttactgagtttagttgaaatatagatttcttttctgtgtctgtttgtgtgtgtaccacttttttgtaatgaccagatgaaaagacaagtcaaaccatatttcctgaagagaaataattcttgcaggcatttgaaactgccttggaacagtcatgggcaatccaacagccaggatttcaaagagccaaagataaaaatcttttaaaggtaacagagcttaaatttgcagataaagaaggtagctggggtactcctcttgttcctgtggagaattaccctgggctcaatgatgttggcatggtagcctggtttatggaaatgtgtacccctgagttcccatctggaaggacaatattggttgttgcaaatgatgtgaccttcaaggctggttcttttggcccaagagaggatgcattcttccgtgcagtaactgatcttgcatgtacaaaaaaactacctttgatttatttagctgcaaattctggtgcccgtttaggtgtagctgaagaagtcaaatcctgtttcagagttggttggtctgaggaatctaatcctgagaatggctttcagtatgtatatttaacacctgaggataatgctcggattggatcatcggtgatagcacatgagttaaagcttgagagtggagaaaccagatgggttatagataccattgttggcaaggaggatggccttggcgttgaaaacttgagtggaagtggggctattgctggtgcttattcaagggcatacaaggaaacttttacactgacatatgtgactggtagaactgttggaattggagcttatcttgctaggcttgggatgagatgcatacaaaggcttgatcagcccataattcttactggtttttcagcattaaacaaacttcttggtcgggaggtttacagctctcacatgcaacttggtggacctaaaatcatggcaactaatggagtcgttcatcttacagtttccgatgatcttgaaggtgtttcttctattttgaagtggcttagctacattccttctcatgttggcggtgcacttcccattgtaaagccacttgatcctccagaaagaccagtggagtatttcccagaaaactcgtgtgatcctcgtgctgccatttctggaaccttggatggtaatggaagatggctgggaggaatttttgacaaagacagctttgtggagacactagagggatgggcaagaacagttgttacaggaagggcaaagcttggaggaatccctgtgggagtagttgctgtagaaacacagacggtaatgcaaataatacctgctgatcctggccagcttgattctcacgagagggttgttcctcaagccgggcaagtgtggttccctgattccgcaaccaagacagcccaagcaatattggatttcaacagagaagagctcccgcttttcattcttgcaaactggagaggcttttcaggagggcaaagggaccttttcgaaggaattcttcaggctggttccactattgtggagaaccttagaacatacaagcagcccatatttgtatatatcccaatgatgggcgaactccgtggtggggcatgggtggttgttgacagtagaatcaattcagaccacatcgaaatgtatgccgatcgaacagccaaaggtaatgtcctagagccagaaggaatgattgagatcaaatttagaacaagagaattgttggagagtatgggtagacttgatcagcaattgataactctgaaggcaaaacttcaggaagccaagagtagcaggaacattgtggcctttgaatccctacagcagcagattaaatcacgcgagagacaacttttgcctgtgtatacccagatagctaccaagtttgctgaactgcatgatacttccttaagaatggctgccaagggtgtcattagagaagttctggactggcgtaactcccgctctgtcttttaccagagactgcacaggagaattggtgagcaatcactgatcaacagtgtgagagatgctgctggtgaccaattgtcacatgcatctgcaatgaacttgctcaaagaatggtatttgaattccgatattgccaaaggtagagaagatgcttggttggatgatgaagccttcttcaggtggaaggatattccttcaaattacgagaataaactaaaggaattgcgtgtgcagaaagtgttacttcaattgacaaatattggtgactcagctctagatttgcaagctctacctcaaggtcttgctgcccttttaagcaaggtaaagcacttgaacttttcatttctttagctacgttattatttggttatgttaattgtttaaggtttataacttggttcatcatatcttgtaaattttggtgcagttggagccattaggtcgcgtgaagttgacggatgaacttcgcaaggtacttggttagaggaccctgtttgtgtcttttaaatgtaacgcaattatttgtgttgattccattggctaagttgttatccccaagggaaaggaggcagttgcatccctcattgctgaagggatccgttgcttcagagtgtaaatgaaatgagtcctggatggtaattaatttatgcagttaggggatcacaaccagcatcaccatgttccatctatttatttgctggttgattgattcttttcgtatagttgaataaaattataataatgtgtaacattgtttttaatgcataacgattttgggtagtcaatgtatgttttccacaaagtttcaaatcaccaatggcagttgattttaggcaaatattaatcaagatttttccaacaagttttaatacatctgattgacgcatagaattagaattagaatttaacattttacttttactttcaattttacaaatttgatattgatttaaaattatattgtttacgtttaagtcgtgcgaacaattatacttttaagttggattttaaccattaatttggatttaagatctagagtttgaaaataaaatgaatgtaaaatatataaaatgatgttaaaatagagataacaattaatgttattttaaactcttaaaaagacaaataaatacttatttagctatttagggattcacctcccaacatctatcccaacaatagctgaccaattgcacgttgatagtgccttgatgcatatcttccacatcttttaccgcagtccctctcattctagctatatgcatatctttgcatagtggttcggataaatccgacgttaattttcacggtatcctaatgagtatggtaccaaagaagaattgttaaaaattaaataaatattgacttcaaaataaatgttccaaattctattaaaattaacttgcaatcaaatgaatcaatgaaatgatttatggataccatgaaacaatgatgtcccaaattctattagacgaattaaaaactcgcttcggtggattagcctactgaatattgatcacttcatttgcagttgtactctaaaattaattcaacaattcacgtgataataccggtatgagaaatatacatcaaaactgatcaccacggcttaaatccatgggagatgtactagctaaaaatcaccaagcacatattgggaccctttctatttaccaatacagaacttgccaaatatatttgataaaacctcctccgatatatcttctccacttatctgtccaagggacaatgccgcatccctcaagtcaattgtccaaaaatccagaggcagttcctcctttattgatgattg

SEQ ID NO: 327 - DNA, 4738 bp, Glycine max
ggtaaataagtatcttagtttatagtcattcaaaaaaatatcctaatttatataagtgttttttatttagtaatttatttctaaatatttaattagactattccgtgtgttaaatatattttaaagaaaaagatcatatcggaggaggataaaaaattgtaaaaaagacaatttgatttgtaacgagtgaattttgaaaagataaatcgttgatttttttagttgtgtattctatagtatttttctttctcttttaaaagattaaattaaaatattttataaaaaatatcttgaacataagatatcttttaatttcatattttatatgaaaagataagagtagatatatttttatttagtattttcttttttcacttttaaaaggttaaattgtttttatttataaaatattaaattaaaagagatatcttatatgttcaagatataatttaaaggaaaaacataattagagaaggattgaaaagaaaaaaaaatcgtaaaaaccagggtgattactgattagtaatgagtgaattttgaaaaagataaaacaggctttttgagcgggcaagaaacaaacccaaatataaaaccactaacgcgctttacacggagttagtgaaatccaattggtcagttatctaaagcgcacggacgacgtcattaatccagccaatagcgcgggagaatcactattacaatctatccaataccaaaaagataaactaaaaaaagcaacttcccctcgtcagcggttaaaaatcctagtctacgcgcgtggagctccaacgcgtgccacgccaccgcggattcgtaatcggaaaattctcgaatcacctagagaacgttggagaaaccccacaccccccacgcaacacttcgctttttccattaagaaacaaatatatctaccgtccaaatttactgatccaacggttcacagcccatgccccgaaccttccagaattcaaacacgttctttaaaacacaccgcttccctttcctctcttcaattcagttcaagaaattgctttgctgtaagtttctgattcctttcttcagaattccaagttttcatttcgttagggacaaaagattgtgagatagagtatggctggaaaaggcgagggtcctgctatcggaatcgatttgggaacgacgtactcttgcgtcggcgtgtggcaacacgatcgtgttgaaatcatagccaacgatcagggtaatagaactaccccatcctacgtggctttcaccgatacagaacggttgatcggcgatgcggcgaagaaccaggtcgctatgaacccaatcaacactgtttttggtaagtactctcaaatcgtccactattaccttgattctctgctttttttctctgtttcactgattttggatgtctacacatcgtgatttataatcataaatttcaattatctgtaatctaaccctagtcagtattaatctttcacgattctttctttttaattaaaaaatagtgtagcgaacttaaacagttgtttcatgtgttagtaagcgtttgtgagacgtttattaacttcttactttgtgattttttttttcaattgttcttgatttgagtttattaataaactagtatttatttgaattagttgagtcgtttttggcgtgagtcgtttttggcgtggtttattaaataagtacttgcttaattgaattgttttatatgttttgcatgataaatttattaaatggacacttgcttaaataatctgcgcgaaagctttcctgattatgagattatattgtgaatcgattggtgattgtgttggtttggtttggcgcgtgcagatgctaagcgtttgattggaagacgtttttctgatgcatcggtacaaagtgacatgaaactgtggccgttcaaggttattcctggccctgctgacaagcctatgattgtggtgaattacaagggggatgagaagcagttttcggcggaagagatatcttccatggttcttataaagatgaaggagatcgcggaggcgtatctaggatcgacgataaagaatgcagttgtcaccgtccctgcttacttcaacgactcacagcgtcaagctacaaaggacgctggtgtcatttccgggctcaacgtgatgcgaattatcaacgagcctacagcggccgccattgcttatggactcgacaagaaggccactagctctggggagaagaatgttctcatcttcgacctcggtggtgggacttttgatgtctcccttctcaccattgaggagggtattttcgaagtgaaagccactgctggtgatactcacttgggaggtgaagattttgataacagaatggtgaaccattttgttcaggaattcaagaggaagaacaagaaggatattagtggaaatgccagagcattgaggaggttgagaacagcatgtgagagggccaagaggactctctcttccactgctcaaaccaccattgagattgattccttgtatgagggtattgacttctacacaaccatcacccgtgcccgtttcgaagagcttaacatggacctattcaggaagtgcatggagcccgtggagaagtgtttgcgggatgctaagatggacaagagcaccgtccatgatgttgttcttgtcggtggttctactaggattcccaaggttcaacagttgttgcaggacttcttcaacggaaaggagctttgcaagagcattaacccagatgaagctgttgcctatggtgcagcagtgcaggctgccattctcagtggcgagggtaatgagaaagtgcaggatcttctgttgttggatgttactcctctctcccttgggttggagaccgcgggaggagtcatgactgtgttgattcccagaaacacaaccattcccaccaagaaggagcaggtattttcgacctattccgacaaccagcctggtgtgttgattcaggtctatgaaggtgaacgtacgaggactcgtgataacaatttgcttggcaaatttgagttatctggaattcctcctgctccgagaggtgttcctcagatcaccgtttgctttgacattgacgccaacggtatattgaacgtgtctgcggaggacaaaaccactggacagaagaacaagattacaattaccaacgacaaaggaaggctttctaaggaggagattgagaagatggtgcaggaagctgagaagtacaaggctgaggatgaggagcataagaagaaagtggaggccaaaaatacattggagaattacgcctataacatgaggaacacaattaaagatgataagattgcttccaagctgtctgctgatgataagaagaaaattgaggatgcaattgagcaggctatccaatggctcgatggaaaccaacttgctgaagctgacgaattcgaggacaagatgaaggagttggagagcatttgtaaccccatcatagcaaagatgtaccaaggagctggtggtgatgcgggtggagccatggatgaggatggtcctgctgctggcagtggaagcggtgctggacccaaaattgaggaagtcgattaagcagaccaattgtcatgggttgttcttgattttgcgaagacccttttgaagtttagataataacctgtcttgtcattatgttttggatttggattttacttttctcgtttttttaatgtacttttccccgtttcaacttaacaatgatataagttgcatatggtctattgattgtttcgtctccatatttgcttaattgcttatgaagtgggttgctctcccatttttgagagttgaacatctcttgctagattgtgtcacaattataacttaaaaacgtcaaaaaatgatgaaaatctatttttttgggagaaccagaaaatagtccttttccccaggccccaaaatagactcagatttttattttttattttttttaactgaataaactcatagatagaagactacgcaaggaacttataagaacatggcttaagtgggccagtgtcaaatagttcgtaaaattaacaattcatgtgtataagtttctgttgtgaaaattataaaatactacatttataacagtgcgtgttggcatcataaaatgtgaatattaataaaggagacttttccaacgtatgttctgagagaaaagagagttgaatataatgttgactttaattttgaaatttattatttataaagtgggtttgggatttaacaccgggagagataatctcaaaaggttttactaaaggagaatatagaggctgaaaaatcaaaaggacattatcctttttagggtcaagaaaggagaatcaattcaaagtggaaactgggctaaagatcctttgtggggcaaactaatttggaatgggccatgtcttggcattacgcaagtgttaaatataccttccctatttaataaatataccttccttttccttttatttccataaaatatccttgtagtttatttccaatttcagccacttaacccccttctcctaacacccatagtcaaaatacaagcataaatgaggtactcaacttagacaagcgcacaaacaccatcaataaagccatcagggctaatgaaattgagtatgcacagtagtaacattgcttttgtgatttttaatttatttgattttttgggattggaggtggagcaaatcaaaggtaaccaattcagattgtgatttcctcttttgaccaacctgtggggattg

SEQ ID NO: 328 - DNA, 6682 bp, Glycine max
atcacattttcattgaaaaaacacacatacacacaaaaatgcacctctcacatagactaagaagacaaaaaaataaggcagtgggagagaaaaagggtaaagaaagtgaagtaggagatggcactgtgaagcaaatggaggagaaagagaagaagatggaagcaagtggggagaaaaggacgagaggtaggggtgtagggaaactgccaacagggtagttttgggagtaagaattttgggagtgataatagcaaccctcaagtaagtcctttagcagaccaaacactaaaaatacaaacgaataaacatctaatgggccttagactcaggcttaaattgaagaaccatacatgtcagtgtcaccctgcaaaaaaggtgagaactgagaactattacaaaattgttatatgactgcatgctgagatttattaaattcttaaccgaccttaagactcttatgtaaatgtgttttttcagcgtgattttttttattttcaatttattttaatattctaaaaatcatcaagttctatgattacttttttttaatatcaaatattaaatttattgatgaaaggaaaattcaattgaatccctttaaacatagtttggaatatccttaaaaacatgatttgtgaagattggaagataatttaacaaaaagtataaatgtataataggaaatgaaggtgtaactgtgtaagtgaagacaagcataaaagagaaatgaggagagggaggtgaggtgtcgcgtgctaaggaagccaagtggtgcagatgctggcatcgttttctagttttaagggattctgttgcaaaccccactcgctacgtatctgcatgcatgatgcatatgcatatgcatggtctcagggtaaaccgttcctttttcttcattcatctttaccaacccatcctttcatatctacggccaagatcacgtagaaatggacggtgatgattgaaagattgcaccgccaagtttatttgttgttttaggggaatttggcctgcgttgcgttcttattaggcgagaagaaaggaataaagaggaaggaaggtgtgacactactgtcatactgcactgcttataacttttttctctttctctcaattcaattgccttctcccctgcgaatctcttctccacgtatcggtaaacctattcctctaacccccattctcattctttcatcgcattttactttattcatcttaaacagccctcagtctctcatctgttttcctaaccgcgtttcattttttatttattttgtttttatgcgcagattgtccctgcaaattgcactttataatataataatcgctttttattttctgtttatgtcaggcgaattcaattttttttcttttgcttcccttgtttcggtggataacaaaaaaaaaataaaatctattatcgaggtctctttttcaaattgcacggatgcgtcgattttttttcgataaaaaaaaatccatatcggtatgatcgaacacatgatattttttttcgttcgtataccattcggtgattttttttttataatttttcacaactcaattttcttgttttgtttgcattggtttttgtggaatagactatttttttgactgaaatggtggaatagactatagagattagaagaactgacacaagattttgaaatgtctcgtttttttttcacgtccccataataatatatttagcattttcacttgttagttaaagcccacatcccctaatttagagtaattatttatgtgctaacaattgcaattaaagtttattaatttggatgaataggagaacatggggaacaagatgaatgcgatcgcgttgtgcttgttagtgtcgaccctgttggtttctgcggtgtattgtgcaccgaatgctgggctccgtaggattgggctgaagaagattaaattggaccctaaaaacaggcttgctgctcgagttgggtccaaggatgttgattctttccgggcttctattagaaagtttcatctccaaaacaactttggtggcactgaggaaaccgatattgtcgcgttaaagaattacttggatgcacagtactacggtgaaatagctattggaacttctcctcaaaagttcgctgtcattttcgacactggcagctctaatttgtgggttccatcatctaaatgcaccttctcggtgagtttctttttttttttttttttttttttttttttatataccactctgttatttaggacttgtgaattagtatcaatttaattccttatttattcatgtcattttgcattttggtgcaggttgcatgctactttcatgctaagtataagtctagcaaatcaagtactttcaagaaaaatggtttgtcttgctcgtcatttctaataaggctttaaagttaacttcattcttttagtccgtgattgaccttttacagtttgcagaagttccctctttttataaattaaaaaactgaagttttgagatttgagtaactggctaatattctatcatctgtcggagtatattgaagtcgtgtctttcctgtctctgtataatatcaataggaacaaacaaatattcttttcctggtgactgaaacggggtggggtgtgaacatttattatatgatggagctgaagtttgaaattttaccatccatcatatggtcggaagtttgtagtttctgacattgtaattgtgacttgtgcttgtttatatgttcatctattttgggccactcgtcattttgtacctgtaaaagggatgctctgattacgtctttctctgcgacaatatttttcttgctgttatttagggactgctgcggcaattcaatatggtaccggagcaatttctggtttctttagctacgacagtgtcagagttggtgaaatagttgtaaagaaccaggcaatactgaattgcggatcatcaatgtttatttcaatagggcttctttcataatgattagtaattagtagttggtatccccttcaggaatttattgaagcaactagggagcctggtgttacatttttggcggccaagtttgatggtatactgggacttggatttcaagagatatcagttggaaatgctgctccagtgtggtatgttactatttaaatttcgattcctcattttgttagaagtttattgaatttattgaattttgttagtgcttactacatcagaccctactggatctaactcttcctatagtgagagtcttatagaaccaggctacccttgttattgtttttaaaattttattgaatccccatgtgtttatctgatcttacctgtcacaggtacaacatggttgaccaaggtcttcttaaggaaccagtattttcattttggttcaaccgcaatccagaggaagaggaagggggtgagattgttttcggtggtgttgatcctgctcactataagggaaagcacacttatgtgcctgtgaccagaaaaggatattggcaggttataatttttttaatacttaataatgctttctttttttacctttttctatatgttaatttttatttttgttttcagtttgatatgggagatgtacttattggcggtaaacccactggtatgtagagaatgtgttagcagaaattgataatttgttcttcctatgatgcatcattggcatttttgtaaatgggtcagagttttaatttatttggactgacctgatctatttgtctatcaggatattgtgctaatggctgttcagccattgcagactcagggacttctttgttggcaggtccaacggtatgaataaatgagtgtagatatagattgattaatgtttatgtagtattcaacaattatgggggtctttagacattgataattctcattgcgttgtttatattgcatgtgaaaaaagatctaacaaatgcttctaactagcttgtttctatgatcacatatgtggttttgttcttgtagactgtcataactatgataaaccatgcaattggagcatctggagttatgagccaagaatgcaagaccattgttgcagagtatggacaaacaatattggatttgcttttggctgaagtgagtaccatttgtaatttgttctccctgcatattttggttgattaatggtcatgagtgggtatgtttgaaagatatgattttctaataatttttcttatgtttttcgcttttgcaccttttagacacaaccgaagaagatctgttcccgaattggattgtgcgcatttgatgggactcatggtgttgagtgagtcccgaagatatttttattccttgaatctttggtcatttatttaaatagtttaatatatttatgtaaaatttccattttattatttgttccttctgcccttcagtgtggggatcaagagcgttgtagatgagaatgaaagaaaatcattgggtggtcatcatggtgctgcttgtcctgcatgtgagatggcggttgtttggatgcagaaccagctgagccgaaatcagacacaagatcagatactaagttacatcaaccaggtgagtcagttgtcttaattttgctattcaagcgtcctgctgcacctcttgatttatagcctcatgatgatagattgatattgcagctttgcgataaaatgcctagcccgatgggagaatcagctgttgactgtgggaatatctcttcattacctgtagtgtcctttactattggtggaagaactttcgaccttagcccagaggaggtatgatttcccccaaaggctcaaacctgattagttgcttttgcaatgactagtcactaaccagatttaatttaatggataaagctaaattcatgaagagcagcaggagttagagtaggggaggatcaggaaactttttatagaaaaataaaatcagaattcaagttaaagctagtacatcaatagctttacggtgtctttgcaattgcataactttacctaaagaaacacatcctataggtgccttattttccatagagtaatattatcctgacataataaatcgggttttctagttaagtggttttatcagattgacattgacatttagttaaatgtgattacgcgagtcttcttctctgttgtcctcactcagcttctattttatttattcagtacgtactcaaggtgggtgaaggtcctgtggctcagtgtattagtggctttactgctatagatattccacctccacgtggccctctctggtacttaaattgcttcaattagcgccattatatttgcctcactttttttcatcctatgttgtctttggattgtgactcaaatcactcaatggcatctccgttaatgtaggatccttggtgatgtcttcatggggcgttatcacacagtgtttgattttggtaaactcagagtgggatttgctgatgctgcatagagtgttagcgtttctcagactatggcgatccaattgctattattagtttatataaccgttgcagtcaaaatggacctaaagttctggcttgtacaggtttatattattaatgttaatactttgggtgttccataatactaaaagcttaacagatgtatctgcggctgcgaaatagtccataattggctccgtagactctatgcatgttttagttgaaagggtatagctatggttctcatgattccttgttagttccctctgttcgtcttcttttgcaagatgcgtgtatggggttatatgcgatgaccttccataatgatagtttgcttcatattaagataaaatagaaatcgaaggagtcagctttcaaatttcaagttacagatataatctatatctatatacagtattagggaaatttgtcaatcaactaaagatgtaaatagccgatcaaaaaaaaaaaaaaattaaagatgtaaataatttgcttcatattaagatgaataatgagagtatttgtaggagttgcacttgaatgaaagccctttttagagttatttttactcattgggccgcctctatcttgtcctaatcttatataatttaatttgatttataacaactagcctgaaatttttctcacaaatcatctcaaatcaatttttttttttcatttaactatatctctttcaatctacctaaataatttagtatcaatgcaaaatatttatgataaattcaaaatataatttataagcataaaaaatttatttattccaaattttaattatatagtttatatatgaaataatattttatttatcatcaattctaattatataaaataaatctttatcctacattatactgagttaaaatgattaagcgtcttctcagggcatgaaaggatcatatgttcatttggatggcaactagtggaatccacgatcaaagttaggtaaagtaggaaaagatcatataattttttagccactgcagggaaaaagattaaaagaaagacaatagaggcaattacgtgaatataattgattttcctttaattttgctctcagggtcaggggtttaggcaggagcactctgaaaccgctcatatttaagtcaattctttcccactaattgttgggttcaccaatttatccctcgcgagttggcaatagttgctgtccaactgtacatcttgttatgcaatattctggttgaactataaagctccgcttgaacagactacgt

SEQ ID NO: 329 - DNA, 8014 bp, Glycine max
attaatggtaggttgaataaatgggtttggatattttttttggagttggctgaattgggagccgtcatgaaatccgaaatagaagtgaaagaaaagaagggggcaataagcgtagtaaaacctccctcccatccaagatcgacaactgtctttgttgtctgttttgggtaccaacaaagccaaacccacttgctcagtttagtttgcttttttatatattaaatgcacaaattgctgccagaatcggagtgaatctaatctcgcatcgcgtgtaaaatccaataaaatactattttattattaaaatgtactactattgatgtttttgttatcataaagattataagaatttagattaaatatatgaataatataagcttttattatgttttaatttttatgtattatgagtatattattatcaattaatcaaaattcattgtaaatatttaattatttcaaaattcaataaattgattatacattgtaactatgaccagcatataaattatataatattttatatattcaatctaaattattatatatgataaaacttttaactttaataagaactattttaaaaattaagtataaaataatttttaattattttttttataataataataatatataaaaattaaactcttataagaagataagtccgcagaaatgattaaagattccaaaataattcttttcttctttttatggatataaatttgattctctttaatatgaaaattctatttggtgtggacgacccttttcacataggttctcctaatatttaagaactagttgaataaatgtgaacttgtgattcaataaaattacttatagtttagactcgcacaacaataatctttcagatgaatttttgttactaatagtcctaacacatatactcaacatcctatccaaaccaaatagtctacaaggagtgctaactaaatagtaaatgttgattttggtatattggccactcataaaagctcgaactgtagaacgaataaaaatgaggaattgtttaatattatttttattttaataatcagagttcattccccagtaactcccacattcacatggtgctcgaactgggtactataaaaatgatatctttatgccatggtggtctctggtcacactcacagttgtggtggtgagtttgaagaagactagagggggttgggttccatggttgttgttgttgcccacacctcttttctttattttaacccttagcctcattgcttccttccctttgttcccactctttcgctttcaaggttcgttgcttccatactcatcttcccccccctcccctcccttttctccttcctctgctgttgtgatgttatgttatcacttatcctattcactttcctgcttttaatgtttctgatgcgtgtccgtttttcatgccaaaaacatgttattgtttcactggaaattgttttgtcggctcatggttgttcagtgtgttaacgtacagtatgatcaattttcttcaaaattaataataataacgctcaattttattccatcattaagcatgtacagttgctgtgtgattgggttgttgttcacaatttgtataggctctagagaagggcagaacaataatgatgtgtatttatttgttcacctgagctgtggagattgtttgtatttcatgattgggtcatagaataaattttttagtagttactgaaagttttttgtaattttgtcatcttgaggaatgcgttggaaattttttattatcttcttgaattgttacatgagcaggagcgatgagttggatggttaagattggagggaagaggatataaggtgagttgcatggttaagatgagaggaaagaggggaaaagttgcctgttcgattccttctgctgacaaaaactaacacactaacatttaacatttgccgataataaaaaaaacatgaacaggagtgaattgattggcattggagtaaattgataattgatttaacttgtttttcagatgttcttatatgattcatattaacttactaatttttttttacattgccagtgcagtttggagtgaaaatgtctacctcaaggcctagccaatcatccagcaattcaaggagatcaagacatagtgctagaatggctcaggcaactgtagatgcaaaaatccatgcaacttttgaggagtccggtagttcctttgattactccagttcggtgcgtgtctctggtacagctgatggagtcaatcaaccaaggtctgacaaagttacaacagcttacctcaatcacatgcagagaggcaagatgattcagcctttcggttgcttgttggccattgatgagaaaacatgtaaggtcattgcatacagtgagaacgcgcccgaaatgctgaccatggttagccatgctgtccccagtgttggtgaccaccctgcccttggcattggcactgacataaaaactctattcactgcaccaagtgtttctggattgcagaaggctctaggatgtgcggacgtttcgcttcttaaccccatacttgtccattgcaagacctctgggaagcccttttatgcaattgtccatcgcgtcactggtagtttgatcgttgactttgagccagtcaagccttatgaagttcccatgactgcagcaggtgccttgcaatcttacaagcttgctgccaaagcaattacccgattgcaatcattgcctagtgggaacatggaaagactatgtgatactatggttcaggaagtttttgaactcacaggttatgatagggtgatggcttataaatttcatgaggatgatcatggagaggtgattgctgagataacaaagcccggtcttgagccatatctgggtttgcactatccagccaccgacattccccaggcttcacgctttttatttaggaagaacaaggttcgtatgatagttgactgtcatgcaaaacacgtgagggttcttcaagatgaaaaactccaatttgatttgattttgtgtggttccaccttaagagctcctcatagttgccacgcgcagtacatggctaacatggattcaattgcttccctggttttggcagttgtagtcaatgacaacgaagaagatggggacactgatgctgttcagccacaaaagagggagagactttggggtttggtagtttgccataacactactcccaggtttgttccctttcctctaaggtatgcttgtgaatttctggctcaagtatttgccgtccatgtgcacaaagaaatagagttagaatatcagattattgagaagaatatcctgcgcacccaggcactcttgtgtatgctgatgcgagatgcacccctaggaattgtatcagagagtcctaatataatggatctagttaaatgtgatggagctgccctcatatacaggaacaaagtatggagattaggagtgacaccaagtgaaccccagataagagagatagctttgtggttgtctgagtaccatatggattccacaggctttagtacagatagcttgtttgatgcagggttcccatcggctctttctctgggtgatgttgtgtgtggaatggcatctgttagagtaactgcaaaagacatggtattttggtttcggtcacacactgctgcagaaatccgatggggtggtgcaaagcatgaggctggagaaaaagatgatagtaggaggatgcatccaagatcatcattcaaggctttccttgaagttgtgaaggcaaggagtttaccttggaaggaatatgaaatggatgctattcattccttgcagataatactgagaaatgcattcaaagaagataccgagagtttggatttaaacgcaaaagcaattaatacaagactaagtgatttgaagattgaagggataaacgatttgaagattgaaaggatgcaggaactggaagcagtgacaagtgagatcgttaggttgattgacacagcaacagtgcctattttggccgttgatgttgatgggctggtcaatgggtggaacataaaaattgctgagttgacgggtcttccaattggtgaagctactggaaagcatttactcacacttgttgaggattcttcaactgatagagtcaagaagatgcttaacttagcactgctaggtatgtctttttttctttctctatcttatccttctatactcttttcttttctttgttttttcaagccttatcattcataagcaaaagcttaaaaaatgagttagtatgtgcctgtgtctatctagctgtgagcaactgagcatattatgttccctaaagccacacatgaacattgcattggtgaagaattctgagaagaaaagtatgtcttgttgacagtttcattcaattttgtgcccttacaataacttgggaaggaatggaacaccctaggagttgtgatgtcatttttatattgggggcttggtgagaggaattgatgcaatttatctgacacagtgggcttgtattcttctaacctgctttccatatttcttaattgttgttttgttctgttaattaggtgaagaagagaagaatgtccaatttgagatcaaaacacatgggtctaagatggattctggtcctattagtttggtagtaaatgcttgcgcgagcagggatcttcgagataatgttgtcggggtttgttttgtggcccatgatataactgctcagaagaatgtcatggacaaattcatccgtattgaaggtgattacaaggcaattgtacagaaccgcaatccattaatccctcctatatttggcacagatgaatttggctggtgttgtgagtggaatccagctatgatgaagttaactggatggaagcgagaggaggtgatggataaaatgcttttgggagagatttttggcacccagatggctgcttgtcgcctaaagaatcaagaagcttttgttaatttgggcgtcgtacttaataaagccatgactggttcagaaacagagaaggttccttttggtttctttgctcggaatggcaagtatgtagaatgcctgctttctgtgagtaagaaattggacgtagagggcctagttactggggtcttctgcttcttacagctagctagcccagagctccaacaagcattacatattcagcgtctatctgagcaaactgcttcgaagagattgaatgcattaagttacatgaaaaggcagatcaggaatcctttgtgtggaattgtattttcccggaaaatgttggagggtactgacttgggaacagaacagaaacaacttctgcgcactagtgctcagtgccagcagcagcttagtaaaattcttgatgactcagatcttgacaccatcatagatgggtatgatatctgtgcattttgttctttttcccccttatttacattcatgtggtgtgaagcatttatcagttggaactcctactaaagcataaaagttcctatttgaaacctcattgaaactcatgactagaaagttaacctcattcatgcaactaaactccaaaaacattgactagtatataacccaactgatattgggtgtttactgttatcatgttctgtttttttttttttgctcagcaaaaactgttatcatgttatgtagttctcaaggttcttgttatgtagttttgtcatgttttgtacttttgttagagtttagtgtacctatttagaagtttaaatattagcatctttgaaagaaggcatccaatgtggatgtttatttttcattcacacggtgctttcaaagtcactctgtagtgctagattaatttgtgtaaaaatacagtttcctcatttatttgtcttggaatcttcgataacagttttataatcattttttccccctgtatgttcaacagttacttggatcttgagatggctgagttcaccctgcatgaagttctggttacctcccttagtcaagtcatgacaaaaagtaatggaaagagtatccgaatagtcaatgatgttgcagggcatattatgatggaaactttatatggtgatagtcttaggcttcagcaggtcttggctgactttttacttatttccatcaatttcactccaaatggaggtcaggttgttgtagcaggctctctaaccaaagaacagttaggcaaatctgtccatcttgttaagttagagctcaggtaactcttccatgctcgcattcccactgtgtatgtgatttaaatgcctggcggaaacactgccataaattgttgcatgatcaacacattgttctcttgtgctaggcaaagaaacttgcattgtttatgcggtcttgctaaccattaaggacactgattaaggaatcaacaagtggttgagattatacgttttctaataaaaaacttttcacttttgattccttaaccagtgtcctgattaacattttccttgttttcaaccaaaacataaagaaggaagttacactataaccttgatttacttctaagtgagtgttacttttggtatttatgtagcataacacatggtgggagtggggtaccagaagtgttactgaatcagatgttcggaaacaatgggctagaatccgaggagggtattagcctactgataagcagaaagctgctgaagctgatgaatggagatgttcgctatctaagggaagcaggcaaatcagcttttatcctctctgctgaacttgctgcagcccataatttgaaagcttaaaagttttggaaaaaagaataaaagatgatgcaacagcaacacaatctgttttctacatcataaagagaacggagctagaaattaatttgcatccaatgtaactctaatttgttcccacgtttctttaactgcttcttgtaacgtacgttgtagatatgtatgattaatcttcttcccattccttgacctgttctcattctcactagagcttttccttatttattccttcagcaaacagcaatgatgaggctaattctgtctctcgcttcttatcttcacgtgttagccatggttttctacctaactttttttctttttgattaccacctaactttttttttcctgcttgcaacggtatataagttgtcttcaatttattgatctgcacatttattgcaggttgtttgtattcgtggatttgtaaacacggttttcttttctctgctagctgtgtttttgtacgactaatgattcaaattcgatcaaatgaccaaaagaaatcttaaaccttagacttttctcattcttcatatgttataggcgtgtctgtcgtaattaggatttttataaatataataaaatttagaaaagtactaaatcttagagtattttaaatgaaaaaaatttatcacttttgtggatcctataatatcacaggatacaagaatttttatcatttttactttaatagtagaacttaatttgggttattagattttatttgcatataaaaaaccaattttttctctctcaatgacattaaaaataatatttttttaataaaagtggaattcttaaaagtttttcctgtaattcaaccccagccagaactcttgagcagaacaagaataaatctagtggataatgattctttaactcaagaattaaactcaataactcttattaaaaatgttcttacaaacttacaaataaataagataaaacgtacacgtaatagtgttttctctctataccgtgattggtcaatcagtttcctagtttgattttcagtgtaaaattgctactattcgttaactctcaaggaaaaatcatgtcaatatcaagcttgactaaacttaagtaggttaaataatcttactaattaattaaaaattaactattaatattacgtgttcatacaaaacaaattatgcatgtagtagaatatcaacatacacgtatatcaaatacaatacgtatctgatgccgtgatacacgattattttaaattatataagatataatacgtgtaagatatgtatttaagaatat

SEQ ID NO: 330 - DNA, 19958 bp, Glycine max
ctctttattaaataatgtttctgttttggacatgggcttggtttttaccaaatgaagaaaaagatgaggtttcaatttttctattaccataaaacaattgtgtcttaatatggtggggctgggggaaccaattggggataggtggatgaataaggaaagcttggtctgattagtctatactatatgccttgctatttccctttttctgagtttctctctgcacttcttgctagctaccctctcttttggggtatttcttttcattctccaaaaactctttaattttccttcccttttctgtgctattctctcctcactggtcaaaaggtttgtgggattttgctaatttggtgcaaatctgattcctttgacaaatccctcttgatctcctggcttattgaaaactactacaattccgagttgctttttttccctagttggtaagaacaatcaattttcaatcaatcatatttgtttttttcatgtgcaaaaaaaaaaaaccatctctgggatttatgtttcttgggttttagatccttatttttgggaagtcatgtacatttactggtactttttttccttataatctgcatatatctgggctttgtgttgaatggttattattcttctgctttgctttcatgcttcagtttaacttttctctcttcacatcctccatattgcaaggtttacacaacatcatttttggcttttaatggttgtcctttgatgtgtggttctcatctgatggaatcttctttgtgtttcagcttttctgggccttgaaatcttgcttggagaaggctcaattttggtggaaacctctaccacaagaaagcatagtttttttgggttaatcatacttggttaggactcctttgagataccatatagtcaacttgtttcagtttagtgaaaaaagaaaacatttttttctaactattattcatagtttttctttttctttttttctctttgttggtgttgattcacacattagaggtgtttagagatggtgagaggaaagactcagatgaggcgcatagagaacgccacaagcaggcaagtcaccttctcaaagcggcgtaatgggttgctgaagaaggcctttgaactttctgttctttgtgatgctgaggttgctctcatcattttctctccaagaggaaagctttatgaatttgcaagctccaggtatgcatataatatgtggatcctcataagtcataacatttcttcttttctagatctttttatttttctgtcacaaattgttactttgtgtgattgcgtgcatatgctaaatgcagtacaatactttttttttgctcttcatgcaaaagttcctttcaattttttagcgagtagatttcatttagacatatgtatgtgttatgacaccatatacagtctcaatagtactcaagatcttcatcataatctcaaaagtgtaatggtagatatgagttacgggctaaggagttatttgattttttttttcctattttttaatcctaaccttagaagtacagtggggtatggataacacctgaggagcctaatttgaagtcttttcttttggggctttgaggagctcagctattcagtttagagaaagactttgatattacattcaagtgtttaagggatttagggaaacacttgaatacttgataacattaaatgatttagttgcttatctcaatggtgttttaatttttatttttgatagctaaaatttttattgatgtaaagagctaatcttaagcacaagttgtgccgaagactagtagagatacaaatcaccaaagtgttttaattaattacatgtgcattgaagccaatttcacctttctttcactatgcttaagcttggtttttggatttcagtaccatttgtttaaaaagattcacaatacttacactttgtgcagtgggtggggggtaaggtagcgtctgtcatagttttcaaacttgcctctattggaatcttttcatactccattttccactgacatttttcatttctcgtacgttagatcactcgtcacattaacatggtggttgcatacattcatagtgttgttaaaatatcattattgtttcctctattatttcttttttgtaattgaataaagggtgcacttattgtataaaaaggaaaaattctgaaagttgatgtactcgtttccttcaacaatgaaaaaagagccatcacatgcatgcagttatagacctagcactgtatcaaacgtactaaaatactgacatccaatttcttgagagagatataatagagagaaaggactccatataatgacttgcactacataactatgattatatgactccaataatatctttctccatcaataaattaatattacttttgggttgaagaaataaggtctcatgattcagacttgtaatatgactcaacaaagtgagcaaattttgttcaactgatatagtttgtgaaaagaaaaggaaaaataaaactccgttagcgaggagcttgtgaagttccaatgttccatgaaataatgtgcggtgtatcaccacagttttcaaaactagaggcacactaacctccttacgaggctgtttatgttttcataatttcattattattatagtaagaacttctagattatatatagtttgtagttgaaactgcaaactgttgttatttaattaattgggtccgaatgctgatgaatttgtttaataaccagagttatatatagtcatcagtaactaagtatgatgtgagagtggtttctcaaaaacataatttcaaaaccatacctatctgtacatgtcctttacctttcctatttctttttgagttgcataaaaggtacaattgaaaatattttattaggaatacatcaacgacaaagctttttctcgttaagtgaggttgactaaaattgactattgatgaagttatggaataatatgcagttaaaactgcaaggtaccattgtatgcttgtaggattttttcaaccatatggttgaatggctgacgcatgatatgttactatgtttgctttaaagttgaagtgttttcagggaacctgcaacttatcagaaattttcttaagttttgtagaaaaaaaaatttaaaattatatacattaatatacttctacttcttctatccttcctgtgattttatactttgggcttaaggtgattaatgttttgaatgttaatatcaacttgcatgttttttgtccatgattcccacaacaacaaaaaaacaatccacagataaagggccaacatgtggtaatatatcttgttacatgtagctcttccttctgtacgcggctcttgttgagtcattgtgctggtgagccaacttccttttggtcttccacaagtcgaaatgagaatagttttaattattaatatacataaagaaaataaattacacataatccttgcccccatagagaaaggaaggtaattaagctagtaaggtttattttaaggttaatagttcatagacatttgatgaagaagatattaatatttctctccaaagaaaaagctaaaagattgttcaactcagactagatctcataaatatttctctttgcatttcttggcttcttatgtgacctacagttcaaatgtactaattcagattgaaaaccgaattgtacttccaataatgtgttttggctgaactattcttgaactaagctatgtaataaattgttgtttctaaaactttccacatctggccgatatatatatatatatatatatatatatatatatatattgctcatgtgccatataactctgctccgcttgcattactagtttggattttgtagcaaacctagtgtatatttttcatcttgattgaattgatttaaaagatttaacttggaagacttggtgtggaaaggatggatttgcctttaaaaatgatatttcaaaatttatttcataaaaactagttttctttgaaagaagtatatgttgaataaattttcttcgtttttaaaagttactcctttttattttttcaaaaattattttctaaaaagtacattgtgctgatagacaataaacatgttggttttcctctcacgtgaactgtcaaacggcattcctttcaataccatcactacatattaaacaagttcttagcagtctcattcttttatatgatcgagagaagtgtacttttttctttctttctttctttagtgtaagggcttagcagcttattggttggctgcttgtgacaattgttttgtggcatatggaggcaagaaagcttcagacaattatttatttatttaataaaaccttatattattagttgtaagtgaaattaaactgaattaatcttagttgtgccacaacagcattaacacaaattatttgaatgtagaattactgatcaaggcttggcacgtgaaactggtccctcgaattaagtacatcacccaagctagggttttgactatgattactatcttttgtgccagttattcatgcaacttctatgacctttttcttctagtgtgctactgccacttgatgagtttgagctgaatattaagaatttgcaactgttcacctcagtttgctttgaattacaatttgagaacatatttaattttttttgtaagtaaaagaatattattaaagttgaagacaagggacattttaatcatacataatacaactagctttagacaagttcgaaatctgtcaatgtagttctaattaagaactgattaatatattcacggagactaaaactcttatgtcactaagtgaaatcaaatatatgaatcaaacattagtctcaactaaaaaccataaaaatcccttttaaaaattttctctaatgtccttcttaatctctttttatcactttttataggactaaaaccatatcgtataatctctttaccggtgcttccaatagctttctttgcatgtgataaaatcaccttaaccgatttcttataatatttgatcaatatatatctcactgatattctttccatcacattaatctttctgtatttcatcctttttttttttttttttttttttatcttagcacattcattttaacatattcattcacactattctcacttttttccccctattgtccctttaaactttagcattcacttgtagagtatagttttggcttcatcctttgagtttgattggtattttgcagtcacaaataactatgatgcctttctccattttaactaccctaacttgtatccagtgtgtagcatttcattcattttcccattattttgtaatattgattcttgagaggaactcaaaaacctaagctttatcaacatgcctacacggaactcttaacagacccaccaataaatctccaaaaacttatagtaacttgtaaaaaggtggaattaatttttcttttctttttgtgaaaacataaatctcattaatggaagtacaaaggatgcttgtacccttttacatcccataccaaatatcataatttcagccggaatgtattagaaaagaatgcatagggtggagctatattgaatttatccaagttgtggcacattaggtgtgtttgaagccaaataatatatgaatatgaagtttttagagcttaatttcatgtatcaagctttggcttggtatatggcccgtcaaaacaatggtcggtgtcagattgacttccatgaagtatttaacaattaattatgattggctagggttttggttgtgaggctagtcgaatatgattagggttgaaaattctaaacaatagtcaataattgaaaaaaccttgttcaaatgtttggatggtgtgtttattggatttgcttcttctaaaatgagagtataaaattaataattttaatggttgatgagaaaattaatgattaatatttctaacacattcataattttgttatttatgtacatttaaaatcaatagttgatttttatttttataaaaaattaggtttaaatatatttaaggtccttgataaatgattgaattttgttgagttcttgataaatttttttcattgttttgaatttctaatatattaattttttttgttttgaatcattattgttaattaaataatgatatgacaccatcacaatcattgacaatgttaaaaagatcaatttataaaataacatgtcaatcacttaattaatgatggagataaaaattttaatatatcaaaaatttaaaataacaaaaaaatttattaagaacataaaacaaaatttatttatttatgaaaaactttaaacatatttaaacctcgaaagtataatgagttattttacctttaaagtttttactttagaggaattggatctgtgttcataacacattttctatgaactttgtgcatgtgtgccacagctttggaatacgagctgaatatttacaagttgtaagttgtatcctcaaaaagtataaccagataagaactagataagaactgcatgttgtatgggtacctaattttttagagagaaaaaatcatattattatgatacacatttttattaagataaatcttttaaataattaagtgatcaacatgtaattacaaagatatgaatgctttagtattcaataattggaagccaacaaaatgaaaaaaataaattatttaacagatttatttgtccaaaaaaaattaaataaagtaatacatgtttcaaaatcacaagagtattcatgtcatattcttaaagagaacctttgtttttattctttaattccaatatataaatatttccccaatctccactttgtagtactgtttttctcatgtcaaattccactgtcacacatttgctttaagattcaatatgagcactgtctatatatactatacataataaaaaactatcctatatccactatcttttttcttccaatctaaatgctttttactattatgcaataattttgaaacacaaattacaaacttaatttaaaatgatagcatgaagttctagatagttcaggtaagcttgcactcagatttgagttataactttgaataatttgaacacattattcacaaattttgtttagtatgaatgagatacaccaaagtccagtctttgtaaagaaaaatatttcaaatttatagactatttagccttttcaagtcctcttaccattaatggtttagggttataaggtgctgctaaccattgtcctaagggcattgattaagaaattaaaagaaaaaaatatttatttctaaatcatacaaaagtataaaaaaaatcataaacaacataattttccatttctcaataaaaatatttttattttaagttccttaactaatattcttaagacattagttgagatttaccttaattatattgtgatatatgtatggaaaactaacctttttttcacagaaggaaaaattaacttaaaaaatgataacttggaactcaagtgcattggcttttgttatcttagaatgcaacaaaaatattttgaaattgatcctctaatgtctcatgtgctatatacttaatcgagaaattcttttgtgagcacaaacccaacacatcactcttaggcacaatcaatgaaaaatttgcagctaatcagattaaaatttaaaaaatgtcaaccagtaaaataaaaataaaatataaaattcaacatttaataaaaaaaaaagacaggagagtaatcctaattcctcccaaatacgtttttagtgtaaccatcttcttcctccatctctggctgctgaacaacatttctcaagtgtgggggaagagattgtaatgcctatttctttattgtttctacaacaaattatgtaaaaatcctaaaattgaaagtcccaaatgataaaagaataaaactttatttcttagtgcacataacacaccacaagccattttcccctctttcgttttcaattgaaccctaaccgttggaagatacgacacatatcactcacttaacattgcatgcatttgtttcacacaaacacaacacctcaaatttccaatttattaatgcaatttctcctgcaaaaatgatttaataataaaaaactgcatgtgaagttttacattgatggttctattcatgaggggcacaccagggagataaatggagttcatgaccggtaccaatggagacatagtaagggaacaatgttgatcaatagtttgagagacagaggaagaaaattgtgctgttaaaaataaacgagcaagaaaactgtaaaattaattctgatcttttttcaattttttattatttacaatttgacattttttattttaatttaattacttgtatatttctcattggtcgtgcctaaggtgatgtgttgtgtttgtgtcacacaagaatttttccttaatctcattcaatattttctaacaaaccaagtgttttttttttcaaatacgaattaaatctaactagattttaaatctaattagatttttgtaaccacccgcacccccaaatcaagtaatataagtagaaatatcgaaattcatagttcatcaaggctcaattttaaaagtcagacattaatgaatgaggaagaaggatactgacaaattgaatctataaatatatgataccttctgaaaaatgtgcatgtggcggctaaatggaataatagaaaaagaagttaggttaataatccatgctttagactttatttacaaatatatattttaactttttaaattaggcacatatataagttacatatgtatttatatttataaataatccatgctttaaacttatttataataatattatataacaaacacggatcaagatcatttatgaaaagaactgcatgaatcgtcctttgatttaatgtatgaaatgatacatttgtcttttgaaatttagtttaataaattttaagggtgagatgagattcataaggcataacagcacatgctgcagttcattttgaactgcaggggatcctattcgatccaacaaacagtgtgagagtcttttcgcaccaccttctgacaattagtattttttttccttattctttttttctttttcaagagtcttcaaatgaaacaatatcattaatattctcgttaatgaataatgactacatcctgcgtgtaatttaatgttcttgaatcctagcgaaagttcaattctcagagcccagtctttagaaacttcgcgttatatatgaaaccaaaatcaatgcagaattttttttcgtacgcttgtttgttcttaaatttattacatgcactgtgttctaattgtattttgtaactgtttttatattgtattgatgaatttcatagttactcaacttagttgtaaggatattatttagataaagtttttttttttctagtgctttgttttctaataaaaaaacataatatttcaaaaagaaaaagacatgactacaatgcataggtttttgacctttttattaaaagatgacaacacgaacacctaaaaggattttatctatattttattctaattattagtgtatagtagatggcacttgactaaaagttatacagaaaaagataggggcaaggccacttgttttgtgaggggcctccccaaaataaaattactcaaagtccatcctcttgcggaagaaataatgatcaaagaaattattgtagttttttttatatcatcaaatttttcgaaatttaaggaaaccagaggaacgaaaataaagaaaactttaggaggtctttggtttggtttttcgtttttattgtcgatacaattttattaataataatgtttaaaacttttacacttcagtttctttatatttttttttattgtgaagttagatggtaaaagtaaggaaatgttattttcaccattttcttcacaaaatattaaaaacatgaaacaatataaaaataaatggcatttttatatttatgaacaaaaatatagctagaaactaaaaataacaaataagcttaacagttgaatataggtaaagaagtgccacattggaaaagaaattgacaaagtattgatccctatatgggaggacttcctataacctaggctaacctaaccgaaagtctagaataaaaaatatattagaacatgcattagagttatgttactagttaaattttatcaagataaaatattatcaagttaagcaaggtaataagtaacttatgactttacttagtttcaatggatatcactcctgctttatttgtttaacatgcatctaacaaaattaaaatttaaaacttcccctcccattttcaatttcccatttaatttatgtcaaagatggtcattaacttttgtgttagatactttggaagacattgattatatatgttctatgtattttttctgttgtttaagcaacttctggttacatatttttcttgaccatggatcagtttatattaatattgagtttcatgaaacagcatgcaggacacaattgaacgctaccgcaggcataacaggagtgctcaaacagtgaacagatctgatgaacaaaatatgcaggttatttacctctttccccttttgttgttttgcagttatagtttggcatttctattcattatctagtatttagatgctgctagaatatctaaatataaacattatattacaagatacctctagatattctcactaaggctttgtaaaatggtctcacacaggttaatatagacttctcccttcctcataatgattttttgtttaccaaacttttttggggagaataaaaaatgcatgtgcttctattgtcgtatgaaataattttaaccaaatggatagactaaccttgctccaatacaattctaaaataatgatcaagcgacttataatctgtttggaaaaaaattcaaaaacaccgatcaagagtttctctctttatgtctagcatgaatatacacagaaagtttgagaaagttacttcacttttttggcgtccgtgcgaatttgttggaggacgtggatctaaacacccacttagtactgaaaattaagggggatcttcttctcaataaatgagttcccaagctaccttaataagcatttgatgtaggcaaataaaaaagtggaagaagatatgatttacgtgaaaaataaagattgaaagctgtaaagaaaaatattaaagaaagggataaaaataatgcaagataaaatatagatgattttgatcgagtgtcttcttgtgaaattcagtagaaaaccttatttagtaaattctatgctaatccaggtgattggtagttggcaagttcagtaagttgtggtgggtccatctttctgataatggctgataattaactccttgataattaggcatgacctgcattctccaaccacttttcaatttacctttttgagcttcaaactgttagaataatcgcttcttattttagtgcaaatccgtccatttgtctccctacatgtgagataatgggccgtttaattttttacattttatttattaaatgtttttgagaattattttgaatgaaaaagcttatccagaaaatcttgttttaaaggtgacggattttgatttggcctgattacgaaaactatggaatttttggctttgaatttattttagcattgggtcattaaaagtttttaataactgtatcaattattataattaagattttattagccttaatttcaaactatcacaaagtgttagcattgttgatcctatcaagctttttgaaaaacgtgtgagtaaaaacaaagcacgttaaaaagttttgatagtcattgattctaggtgtgaagtgtcaaagtatgaagtgttataatgtgtgagccatcaaggagtcgataatcaggatgttacatttgacaccccgagaaaaatctcgcctctcttctttgggtttgagttttcacccttactagttatgtagcctcaacatatctgagaggttcctattgtatcctagagaacttgaatgagataccatgtataagtctttaaggacaatatcaaaacatgacttaggaagcaattgttcatgatctccaatactatttccaacaatttaaggttaaaaaaacaaaataattcaaaacaaacaaaagttgaaagtgcacctttcgttctatttatgtctcctaattaacttttgaatttgtaggtaaaattttcatcttccttcttttgtttcttcttctgagaagaaccttcaatatctattgctttgttcttatccttattttgagaggtcaaggtcaaatgaacactttttttcttatcccattactatcattcccgctcttgcatagtgagatataagctcgttctagaatcatttatcctttcaagtgttataactctttcaattattgaaaatttgttggtcaagatcaaaattaagtgcacaagcatgccttcaaacaactctaactttagtgccttgatttttaatgcgacattagacaagttcataatgtactctttatgtttcctttgtccttatactttaatgagatgagttttgccagaaggttgtttgtctttgtcctttcattcttagcaaaatattgctccacttcttgtcactcttactcttagtaatagaacctggaattgatttcggaatggctgttttcattatcatcaagtacatttggtttgagggatcccacctctcaattttaagtacatctatgtatttcagaataggaatgactcgttccatcctaagtgcagtattaaatccataagattaaagatgatctccatagcatctttctagactttgaaatttgtctcattcagcattgagacactattaacttgagaaaaattattctcaacactagctacataaattgcacaaaggaaaaaaaatagaaaaatattcacataaacaagatgtcaaataagacaaaagaagtaaataaatgatccaaatgggcactccattacaagatatttagcacactattgatttctaatctttggataaataaattaatttgtaagtggtattttcactgcaaagatcaaacgctgacaattgatcaggtttgtcaaacaactcattggattgactattgtttatatgaaaagaaaactttatgattgtcacttgtttattatattagacatgtctatttgaaagtggtaccaaagatgatggtgtggctaagttatgtggcaccttctaccccatacatatatgtactaataatataaggaataataaattataattaatttaaagtttttaaaacacatttaaataaaagcctttcaaaagggtaaaaggctcacattcacttttgtaacatcataaaatgacttgtccaataaatactaaaatcatctcggcttaaaacaaggtcgttcaagactttaatatagaaatttatgcccaatgtcacatcttatcagagtattgtgtctcgacgtcctttatcgtaaggttccttaaagcaattcacctagtcatctgtttttcgaacacaaggttcgagatcatcataggattcaaacacaaataacacacgaagagtgagtcatcatattcttaactaatagagaaacaagacaactagatatacatatcatataaatgaaatacaacttacttaaacataattcatgtaattccaccactgtcatttaaaattcactttttaatcatcaatcacattacacatgaatcacacactttgatcaagatataataacactcatcaatttcataataaacaattagcaagcattatgcaacagttatgctaagacccaacctatatgcaatgtggtatcatgtcagtgaaaagttatcctgggacgcttaggaatacataactaaacataccacacaatgagtgtgttaggttattctcactaagtaaaatcataaggtgaccagtcagggtcactccgttttacgaaaatgctccaaccatatgtgatcaatataggcttaaaggagcactcaaaccgagtgtctttacccccaagccttagactctgaagaatccgttagggtctcatcttcctgattcaggttcaatccctaaaataattttagcaagcagatactgctaatgaattttacaatactcatgacctcacactcatgtttcaaacacgtttaatacattgcgctacaatttaacattggttcttaactaggaacctacactttctctttaacactacgcataaatatttttcttaatataaacattgatcggattattgtataattcacagttcacaacataattattgtcatatcaagtgttaaatacacacacttattcacaatcaaatatcatacccacaatttaacatctcataatgtcacaatccaccatcaaagatttacatgtatttcataaattatcacatgttcaactttgtacttatactcaattttaacaacaatattataagcaaacattgctcgtgaattatataatattcacgatctcacactcatgtttcaaacatgtttaacacattgagctataatttaacactagttcctaactaggaaacctacatttttttctttaacactgtgcataaacacttttctcaaggtaaacactagtcggattattgtataattcacaattcacaacacaaatattttcacattaagtgttaaccactcatttattcacagctgaatctcatgttcacaatttcacatttcataaagtcacaatccaccatcacatatttacgtgtatctcacaaatcaacacatgttcaactttgcacttatatttaatctcaataacaatattataattgcaaagcaacatgttatctcacaactcatcacttatttaatttatcacttatacacaatttcaatcacaattttacaattccaatataattatttatcatgctaaatcttatccaaaacacaaacaaatcatacaaaaatatttttcaaaacactaggagtaaaatccctcaaacagttcacataatcatacaaaaagaattataatacaataaacatcccaaaataaatctcaatttgattctctaaggattcttacacattttcattctaactccaattgcgataaattcatcctttacctctaagcgagctcatgtgtgtattctgacagtgatagcgatatctctaatagtttcctgagatttctcaagtttttcctctgactgctctgatagggttcccaaacgttagagagaagggaaagggattgaagcgttcattcaactgtgtatgtgcgatgaatatttttcccttcacaaatattttcttgtaaattccaacgatgaagatgtgcggaaatgcattgcgaaccacatatcaaaatttcacgacaatccaatggttaacgagtcagggatcgtagttttactgagatggttttgaatttctgcaagaaaagaaaaagctgcgatacaaagggtatttttctcaactccgacatcttttcgtaatttccaatggtgagaatgtttggaaatgagttctgaacttggcactcaaatttcatgatgatccaacggtgaatgagtccgagatttttgtttttatgagacagatttggtggtatgcaagaaaaagagagaattttggccggagaagagaaaacgaaattgagaggagatgaggtatagagagaatatggtcatttgaaaattaatctaagatatttctatttatagctagggtacttacaatctattatttactctattttttgtttattattttataaataaatattctattttattttcgatcaaatgaataaaccaaatatctttttttcttcctataaaccattattttaattaataacatcattttttcttatttatttaattataaaaatctcatcattttctaaacctctatttttttactaattttttttaatttatttatgaaaaaatgggatgttacaagtcagatgagtaatgagacatgaaaaaacttgtgatggatctatatacgtggattcctttattgaaagttttcatggcaatgtggaggttattgtcaacaatagttaagctctagaatcatcattagatacttgtggacggaaaggattccgattgagggtgatttcatatcatgtgaaaagatattcacacttagattattggggtgcaagtttgacagtaaaaaatccaacattggatagaaatgagcatattgatcaaaacctaagtgacaatgattcacaaatctaatatcttaatattttgaattgtatttggtgtcaaattcacttgtatgattgtctcgtgatccattgctagaaatcttctcaatattttattccctcatattcttaacaatgctaattaaatatgatgaccgactcttagttgaaaaaactttactcttaaactttagtcaagattttagatgctaacatccaataacaaaactgtgaaaacctaggatgtacctcttgccatattatcaaaatatttataaaatttatataaatagctggatcaattacaattgatcgccagctattgtgaaatctctataacaatcaatcacatacaaaaaggaatggtatgtggtctctctcaaccaaattgccttagttccttaataagactgccatctctcttcctgatgggaagaagaaaaaatgttgttattgggtatatcatggaccacgacaaattggtttcttctatatgattaattagggttaatttttataattccctaataggtcaatattgccatcaactcattacattcacaccaattttagaaaggtataggttcaccaaagtacaccacataaaatgaagcccattgaattaaatagctaatataattaaacatgacagccacatttagaccagggaacgtgaaattcttaacataactatcctgaaaaaccataaattctagaaaccctccactcatgtcttgaacattcccactgtatatgcatgtcggatatgaacatgagaataaagcgtattggttaattggcatttcttttatttctatttttatttactgttttctttatcatagacaatcattcaactttggaatactgaggactgaatgaacttgtgtaatatgtggcagcatttgaagcaagaaacagcaaacttgatgaagaagattgagcttcttgaggcttcaaaacggttcaagatcttgcttttcaatccatcttcgcaacttgtttatattcactgttagatttatctcacaaagaataaaaataaaaaatatattctgtgtactattcatccctcaggaagctcttgggagaaggtttggggtcatgctccttagaagaactgcaacagatagaacaacaattggaaaggagtgtaagcaatgttcgtgcaagaaaggttagattaacaagctcataatttatttttattttaatatttcaatttgataaatacctgaatcccaactttccattattcagaatcaagtttacaaggaacaaattgatcaactaaaagagaaggtaagttattcatatagttgaggtggttggagttgaatttgtgaatgtcatcttgcatttgattttgttaattgtcagtgtgataagaaactggaatgccaatgtaaacatgttggaacttgacttcttctataaagagtatttaattccaggttatgtgatccaattagcctcattgtggcacatttagcttactttaaatttagcacttctagattcggagattcactttagagagtgagcaaaggagttatacatgtgtatgcatttaaccacaatctcaatcatttaaccacaatctcaatcattgatttttcaaccttccacgttaggtcttttggaccttatatcaaccaaaaattgaaactacaaaaagttagagaaaaacaaatttggaaccattttaaaacataagtccgattccaactggggacaactgcataggagggatctgcatgtcattaaagttgatttaatttcaactatttttctgaaaaatttagacacagactccatgtagttgtgactaattaccatctgaaactggtgttatcagaattactccttgatattttgtgtttgaatttaattctgtatcattctgagttcatgaatatttttttgtaaacagaatgaaagttgttttatttcccttaatttctaacagttggaaaaaaaatcatatcagcttggactacattaaagagatgctaactagtgtgttttgattacaatacaggaaagagctctatatgctgaaaatgctaggctgtgtgagcaggtgaaattactctactgttactgctgtctataatttgctttggatatgtttgttgagcacatgttttagatttggaggaatacaaacaatacactctaccattttcttttcaactcacattccactattaagtgaaattcatgtaggtttcattaaataataaatgaaactcattaaataggaggtgtaaattacatcatattacatcatttgtttagaacttaaatgaatttcacctaattggaagaaaaaaattgtgtcaaaaagagtatgttagtgttttcttaacatgttttttttaagattttagaaacctttcaactagactgaaagcctaataatatataactgaaattctcatgcagtatggtatccagccacagccagcaacaaaggatccgaaagaaattcaaccctatgcagaaagcagtccaagttcagaagtggagactgaattgttcattggactacccaggtctatctagttgaagataatttaatccttgcctagtatgaaataagaagcccaactgcaatgtataaatatcacatgtttcctaatactttgagatgaataatattatcgcttatattatataaagaactttccaattttatgattagggtatgcgtttgtctttcctcatttctgagctttattagttaggacgtggtaaaaattttggcttgctagaactagtgaaattaacaaagatttttggactgtatctaaaatacccttctttgttgataaaagtaataattattgaacgtttataaaatttagtaaagagtgacaatgcatacaatgaaggacaatctcatagatatcacatatagaaagttgaatattataaagtttatttgtagattaatctgaagccttttcatgtatgatagcgtgtgtttgtagggaaattagcttgcaaaatttgatacgtacaaaatatgttcgaataactacatttacattgtgccatataatcaaatttgacatcactaaatcttattgctttctttccctaaagttgacattttatcttataaggtccaatgtaaatgtttttctctaaatgaaatggaaatagttggagagaacaggattctctgaaaaagaaagatactaatatgattttgattttatgagagagaaaatataaaatagtttataaattttcctccaattcagagtcaaatattttaaaatttgtataatacccagataaattgtttaaaaacacatgaatctaaaatttgacaatagaaaagtaataagcaagacatgagttcataattgttagtattcaccaaattgttagaatatttatggcagataaaagttatcccatttcaatgtcaggatatgccacaggcctcaactaacattaattgtattcaacacctttcagttcagcaatttaggtgccacattggcaattgtgttactcctctatgaactttagtaagagaacagaattctgagaacagcatcctttgtggggagagaaggtatggctcctctccctgtcactgtgaaagcagcacaagcatttgcaaaatctagagcctccctcaatcttttctcatcctaaaaatggcagaggaatgaacactt

SEQ ID NO: 331 - DNA, 5656 bp, Glycine max
caaatttttaaatagattttttattagtcttgaactctctgtggtagatataacaaaatacaacaattgaatatatgtagcttaatgtcatgatatttgcaatcaattgcaatagctttcgaattaaatatactgcctctttaatttaagcaaatagctccctaatccctactgaatcaccgtgagtttgacaggttctgactttctgagtcctgtgttgtgaaatggagaacgcatgaaaattaaattcaagagagcttaaaggttagggagttgtgtgatttttccgattatcccacgtgtgagtcacaacacaacttgtgtagaaatgcaatgcaaagaaaggagagacgtggaagatggatttgttttatttatcgcatagtgcatttaggataagagaaaaaacctaaaaatctagagaacaaaaaagttgtggctgcaatttgcctatcaattcattgtatcttccccactcagttaactaatcctattcacttcctcttcctctctcccttcccatctatccttctcactgtgtccattctgtcaaagcctttgggctttttcgtacaactaggtagtgaaagcaacaatatacgaatttttgttgaaaatactactaataatttccaccaaaagcacaaatgttatgataaaaaatacaagcaaaacgtaataagtgccaaaacttaaaaagtcatcaacccaataatcacactgtgcttacacctatttatggcttaaaatctccctttaaacaagttagaaagaaaagccaagacaagaaaagaaaaaaagggagagaagcagaaagagagagagagagaactgaaaaaagaaaagaaaagataagactaattaacgtttttttggtttggttttcttcaacacgcaggagacacgaagtaaagagacaagttacatcagatggttaaaacttgttaaaagagtttgtgtatgtgtgtgaaagtagtttaaggttgtgggggtggttgaagaagttttttagctttgtagatagagatgtcaggtggtggaggcagcatagtgtggttcagaagagatctgaggatagaagacaatccagcactgacagcaggagtgagagctggtgctgtggttgcagttttcgtatgggcacctgaagaagaaggtcaatactaccctggcagggtctctagatggtggctcaagaacagtttggctcatcttcattcctctctgaggaatcttggcactcctctcatcactaagcgatccactgacactctttcttctcttcttgaggttgttaagtccactggagccactcaacttttttttaatcatttgtatggtaagttttctcttccctactactactttcaatattttatttgccactttttgtttcctatgataaaaaattctactttttttcaaaaaaaaatttcaacgctgcaaattggatgccctgattttgagaagtttattgcttagttgtattctgtaaacatcattttggattgtaggattctatatattatatcagttgggattatttctttatggggtgacattgtacggatcaagacacaagcatttttttagcttgatttgtttggccccacttacatggttgtctttgattgatcctccgtcaaattcactttgccatttatattcatcttttgtagtttgcttcatgacaatctaaaaataatgttaaaaggtcatgttctacttcatgatattttcgtttgtttcagttcttgtttgtgaaagttacttgtgattttctatgttgcagatcccctgtcacttgtcagggatcaccgagcaaaggaggttctgactgctcagggcataacagtacgttccttcaatgcggatttattatatgaaccatgggaagtgaatgatgcacatggccgaccattcacaacttttgctgctttttgggaaagatgccttagcatgccttatgaccctgagtcacctcttctcccacctaaaaggataattccaggtctatttttgttcacttctttcctttgcctcagttatctcttaatttcattcctgatatagactagttgccaattacataatgttcaatttgttctttcctattcgttactgaacaatgatctaaattggagaaaaaacaaaactatgtactctttgaatgccacttgctaagttgctatttaacataacagaaaggtgaaaactataggcataatatttaacaatatggagttcattttagatgaacaaatttatagttacatgtgcataatttaccaataggcgttcagatatacatattcaagaactcatttgaagtgttcaaattttgcttctgatataaaaaattcccctagtctgcaacatctgaggcattgttcattttccttgtcctaatcaggctttactgcaatttgcccttgttgacaactcttgtcctatttcaggtgatgcatccaggtgtcctagtgatacattgctgtttgaagatgaattagagaaggcaagcaatgcacttcttgctcgagcatggtcacctgggtggagcaatgctaacaaggcattgacaaccttcataaatggtccactgattgagtactcaaaaaaccgcaggaaagcagacagtgcaactacctcacttctgtccccccatttgcactttggtgagttgagtgttaagaaggtcttccatcttgtccgcatcaaacaagttttgtgggccaacgaaggaaacaaagccggcgaagagagcgtgaacttgttcctcaaatctataggtcttagagaatattcaaggtacattagtttcaaccacccctacagtcatgaaaggcctcttctaggccaccttaagttctttccttgggttgtaaacgaaggctattttaaggcatggagacaaggcaggactgggtaccctttagtggatgctgggatgagggagttgtgggccactggttggctgcatgatcgaatacgtgttgtagtttccagtttctttgtgaaggttctgcagcttccatggagatggggaatgaaatatttctgggacacccttttggatgcagatcttgagagtgatgctcttggttggcagtacatatctggtagtctccctgatggtcgtgaaattgaccgaatagataatccacaggtgctgttacttattatgtgtaaaagctacatatttcatctttgtgctgaccttttggatttatgatcatttgattgcatgtgcatgcactctctcttcttttgttttttctctcaacttcttcctcttgaaatattcattccctctttttacttgtgaatttggtctgatatatgatctatcataactaatacaaaatttatcaagtttttcttcttaatttaattttgtttagattactacctgcccgtgtctgtgttcctccaactatagagtcaataggattgaattttgagtttgtggttattgacattggttttgaggttgagttatgtcctactatcagcaatttgaatgctgaaaactgatagactttctagtaatagatacactcatttaaattgttgggttttgtagtttgagggatacaaattcgaccctaatggagaatatgtgcgacgctggcttccagaacttgcaagattaccaaccgagtggatacatcatccttggaatgcaccagagtcagtgctacaagctgctggaattgagttaggatcgaactatcctcttccaattgtgggaatagatgcagcaaaaaccagattactagaagcgctatcagaaatgtggcaacaagaggcagcttcaagagctgcaatggagaatggaactgaggaaggacttggagactcttctgaatccgttcctgctgcttttcctcaagacatgcaaatggaggaaactcatgagcctgttaggaacaatccccttcctgttgctcggcgctaccaggatcagatggttccaagcatcacttcttccttgttgagagtggaagaggaagaaacttcttctgatcttcgacactcggcagaagagagcagcagagctgaagtgccagtaactgcaaatgcacaacaaaatgtaggagttacattgaatgaacggatgctgcagaccactaataggaatgcacaaacacaatacaatactacaatggagctgagaaatgtagctgaagattcagcagtagaatcttcaagtggtaccaggagagaaagggatggaggtgtagttccagtatggtctcccccagcttctagttactcagaacaatttgtaggagaggaaaatggtataacaaacagttcatctttcttgcaaaggcatcctcagtctcaccaaatgctgaattggaggcagctacctcagactgggtaagatttcccaaaccaatgaaattatgaaagcattgatgtcttatatatactgcctgttctgaacatttgaggaacatcaaaccaattgtcaaagttctgcttgaagtttatgttctatatttaatttaaagattgtgatcccttttaatttttgttgactccttgttatcttatcagtgttaaattttgatcacaggtaattcatatctaaagcaattagactagaagcaaggaggtggaaattacactaccacttttctgttgagagaaagtgaggtgttgaagccccattgaacatacatgtgttaatttccttctcctttaccaccacctgacctccaatgtgtatggaaatttcaattcatacggcagttcatctgcagtcccttctgctttcttgtacaatatttgcaacttgctgtatagtatagtttgtgtagtgagggagaaagagccaccataggatctttggtctactaataaactcagatttaaaatgttacatctaaaaaatactatttatttttatcaaagtatatttatataattttatttatattcattttcttttctttcactttctatataaccaaacaaaaggaagtaaaaatataactctctttcttactaaacaacctaaataatcatttcagtttctattctttttctttcctgcttcattctttcttcactttctttttacttcccttcctaaagcataccaagcaagataatgactgattaagctcgattaaataacattaagcctttcggagcaataagttaaatacacaccagtagcatatttataagataaatgtttgtttttatataattaaaatttataataattttaacatattttatattttgaaattttaatgaatgatttaaattataatataatgtttttaagagaaattataatctaatgttacttttaactattaagaatttcttttaaaaaactactaaaagagataaaggattaaaaaaatcaaccatacagattaaaaaaaagagtagtttaaaatgtttgacagggaattttttttttattatatatggaggtaaggagtgaaatatatccaggaagaaaaaaaaaagatattgaagatgtagagaaaagtaaaaagtctcattattctccaaattgtacttgggaaagcattccaccccctagacatttttccttatgcttttttgtgtgaaaagggaactataatggtagtagcctcactaatagaaaaaatataaggcaaagacc

SEQ ID NO: 332 - DNA, 7560 bp, Glycine max
tctgatgtcaagttccacttaaaaagataagttagaaaaaattactttttaattaaaattgatataattaaatataatacattaatcttaattaatgtatcatgtatttttttcttatatttgagaagtgggagaatatgtcactattttgtcatattccttaacatcaatattaccttattaacattattactcgataatggaactaaaagtgataacatagataaaatttaaagacaatgatagatcaaaatttaagataaggctaaaacaaaaagtaaaaaaatgtttagggaaaaaagataataaacccaaaattattattattatacaaatatgtgttgacttttattattattattattacagaaatttattgtggaatagatttagattttattgataaaaaggaaagtgataggatattttggacatacattaaacacattggttctgctcttcatttgggcggagtgagaaagatctgcaggtgacgtggccggctccctttctctacccaactatccagaccacccattccctctccccttttctattgcacttttctcccttccctttccacgtctccctctcccctacgccacgccccgtgcgcactgcgcacccccctaaatccccgcgcacgttagctcaccccccttccttacttaataattccaatttagacactgtttttcgcactcttcccttcgccgactcctattgactcaataataatcagccaccaccgttttcttccccctttcctttaatatctgctaacgtgcgccgcctaacggtgccctttgatctccctcaacgatgttgcagttttatcggattgagcaagtccagggttcgttgtgagaagaatttgatgagagtttttatgaaagtcctttaactttgataataggggtagtgggtgatgagtgagtgagtgagtgagtgagtgagtgattttgttcttttttttttaatttttttttgggggttgggtatggagtctggtgaggagattaatttgaacatagagagtggtgggaagagtggtggtgatgggttcattgataggagtaaggtgcggattttgttgtgcgataacgattccaagagttctcaagaggttttcacgcttcttttgaggtgttcttatcagggtatgtatgtatgtatgtatgtatgcacggattattattattattattttctttgactacctattgatttttgtttgtgggtaattttttatccattggaatcgaagacagtttcaggagatttacaataactgacacactaattgagctagacgtcgttgactttgtttgtgcgtaataatctttacttgctatggttatgttatgtcatctttcaaactccgaaagaaaaaaaagagttttgtttttcggggcattatgttgtgaaaaatgatttaattatttaatttgaatttgttgctaaaacgggtactgtggattcggattttgtatgtgagttggcaacactgtgaaaaggaaggaaacagaaatgcagaatgcagaagcacagagagggggcagagaacagagaagcttaagacagagaaggaggaaattgcttatatttttcatatcccattctgtcaatacactacatatatatagttatatgtgatcactacaggacaaaagctactaacagaatcctctgggcacgcataggatgcactagtgctcataacagaattgagcactactactactaacataatggagtactaccaaattgtgccaaaatcccctaaacataatcctttaagtgctgaggtggtttggttttccttttgggtctgtcaccatgctcttgctgaggtatcacctccttttgcctatcagaaaggaagaatgatttagtcatgcttgaatttcattaagccaagtttgactatcatcgtaccttttgaaactcagtttgtgttctttgtgctaatgttgactgttgagtttcaatgattggttgatgaacataacggcaagagggatgtttggttgcgaataagataagatgggtttgtttaagaccttgcagggtagttgcttgttgcaacttttacatgtataatcattataaattctagattcttaattcttctattgtggtttagtttcaggttcattttttgttttgatttcccctttaaaagttggtagtatgaacttgtggagaagttttatctgtcactgaaaatgccttcaagtggtgattttgttgaatgctttatgataacctactgtgtgatgatgtagtttagcttgtttggtttaaaggccttgcaattaatttatgacatgcttcctgagattttatatatttataaacctcttgattttctctgcttcacagttaccttggtaaagtcggcaagacaggtaattgatgcactgaatgcagaagggcaacatatagatatcatactggctgaacttgaccttccgatgaagaagggtatgaagatgttgaagtacatagcacgtgataaagagtttcgcagaatccctgttataagtaagcttgtgttctttattttgctaagaaaccagtgagactcttgaatttaagcaaattatgttctgctcctcatcaatgttttgaatatcttgttttgataagtgatgtccgcacaagatgaggtatccattgttgttaagtgcttgagacttggagcagcagactatctagtaaagcctttacgcactaatgaactattaaatttgtggacgcacatgtggagacggaggcgcatggtttgtattggtcaacttcatatttatggatgttccccattttgtgttctttcatcctattattagtttttaacccattgtttgtaaactttgggcaatatgaaattgatgccgagttaccatcacagccatttattcttggaaaattatgttgtcaagattcaagaatgacacatgaatgctccttagttatatgtataagatactatacataattttttgatatactagatgagtaaaatatatatcattttgaaagttttttatgttaagttttgaggttgatctggccaatctactttctactaaaagtttctaggtttatgatttggccagtcatttttttattttttatttttatcttttttatataacaaaaccatttgtctaattttgtatggagctactataggagatgcttaagattttgcaagaaccacattgcataccatttatcaggctacctcatctgtgcaacagtttagtggcaatgccgaacactgttagttacccacagtttatgtctgctactgtcacagagacattatttatagttagtggtttcatttttgcattgcatgaaattatgttcattaagttttttcagatgttaagaatatggattttggaaagaactaggggaccttgagttaactggaggtttcatatggaaacactttacatggatgatgaatctaccatacaatgtacataggatataaaatgttagggtggcctctcccctttgccccagctcattctgctctttgcatataaacattcatgaaacttttctctggatttaccaattcattcttaggccttcccaatttgaaattgtttcatatctattctggcagcttggacttgtagagaagaacatcttgaattacgattttgatctggtagtatctgaccctagtgatgccaacacaaacagtaccaccttgttctctgatgacacagatgacaagtccaagagaagcactaatccagaggcaggaatatcagtccaacaagaacaagaggtgaatgttaaaataaagtatttaaataatgcaagaatttaataagcaatgggatcaactcacgatcacagatcaataaatgtgtgcatcatgctaaacttttaaattaatctatgaaaggtgggtttttttattcaacttggggcgtactttgcaaataattctacctttcagagtataaactttgacatcgacatgtaagttccatattgcctttcaatgttaaggtgacatcaagtctggctaataaataaatcaattccctaaaaccaattttaagtagcatgggtgtgggcatgggcgtggaaattgtaaacaaaacctaagtgatactttgaaaaatattatttaggacccaattgcaaggtatgggactttgagtcccacattggaatatgggattctagtgcgggttttataaggccttgtgctctccaactagagctagcttttgtggtggggttctcccaagtttcttatcatttaactttaaccttttgggttagttagtttataaaggactgttgccatcttgcatgagggggcatgttagagattatagatgtagtgtaaaaaccagtctttacctaacagcttaagcttcttgggtagttatgcatgatacagcatgctgaaaaatgctgatgtgccccatgcacaattatgtatagtgtcattgggttacatgtggagtatgaagaaaagtggtggtgtgtctcctcctcacagatccaaaggggtgtaagtgtaaatgggtttagatgtagcatttctctaataccttttatcagctagcaatgagcagacatcattatatgggtgtttaagctatgggcagacattattatatagctactaataacttcaaattagaagtgttgtagtatgtggtcatttatgcatataatttatcttttcagtctactattgcaaatgctgctgctgttgagggacctccagatgctcatgcatcagaatgtgggcctgatgtggatggagttaatgatcaccaaacaggtatgcttcttttcttcatttgaccttttcttaaaacccacaaattgatgttgatttttgcaataaaaatgaagttatacagtgtagcaccaactagttctgtagtaagaacttgttttgaataccatataatgacttaaatggttacaaatttgctgaccaaaaaaaaaaaatggttacaaatttttggttttgccgtcattctcaccttttagcccgtcttggtctgtagaagtatatctgtttatgtaacagaatcacttgtttatgacttgctttttatagctccataatttttaatttctgaaaatggcttcaatctgaatgggaatttgagttcctgagtttgaacaaaattcgacttatgcaaatacccatttcagttctattgttttctctctgattagctgtaattttgtagcacatttttcatctggtccgaagaagagtgaactaaggataggggagtcatcagccttcttcacgtatgttaaagcatcaatacttaagagcaacttcgaaggggttgttaatgtagacaacaatggtgctacgcatgttgggatggaagttatgcatcaagcatgtgctcaacaaggggtgaatagccttcaaatactggaaaatggagaggcatgtgaaagtcaatcgcaagatgacttacccagcagcactagtattcctgattctttgtctattgagaggtcttgtactccacctgcatcaatggaagtttcacagcaaaagcactacagggaagaaaattcacaacagggtgtgatgcatcccagaaatgggacccattgttccgagcatgaagtatctggcatggcttcccaacatgcttatccatattatatttcaggggttgttaatcatgttatgatgccttcatcagcacaaatgtatcatcaaaagaatatccaggacctacagaatcatactagcacagctatgatttcacaatacaatcatcttccccaaggcggtcctcatggaacggggatgacatccttcccatactacccaatgagcatatgcttacaacctggtcagattcctaatcctcattcatggcaatcatttggaaactcaagtccatcagaagccaaattaattaaagttgataggagagaagcagcattgatgaaattcagacagaaaaggaaagagcgctgctttgataagaaaattaggtacattaacaggaaacgacttgctgaaaggcggcctcgtgtaaggggacagtttgtcagaaagttgaacggtgctaatgtggatcttaacggggagcctgcatcaattgactatgacgaagatgacgaagaggatgaagatgaccagggagcaagagattcttctcctgaggatgcttgagcatgtcaaattgctattttgacttaaggatgaagggccaatcaattccttcttgcaactaatattggctgtcaaaagaactccttgctttggaaagttctcaccaaagcatcaatttatgagcttgtgctcatgtatttggggtgttgatccaatatgcacatttatggttgaaacgagctcattctggacattttttaatagcagttcatcaaatgatccgtactattgagctattgcgtaaggtattttacctcctggtggttatgtccaattcagttgaaagtatcacccctgcgttttatattgaatccgttacaagcaggttgttcctgcttattttctggagaaatgtcaagacatctttaaaaaattgaactgagaaatgagttatttgtctaaaatatttctttcaaaatttgaccaccatccaaggcatttcgcctccccaattttctttgtactttttttttctttttgtttacccggttgatgttagttcaatttttcggcacagtgaaatttcagaactacccaaaacctaacgtaaatgtttccagagtaaaacctattaatttatatattatgtaagaaatcgataatgaacgaagcatctaaaactgaatgatcttacaaaattactaaaataattatatttaaagttttatgtcaagtgaataaaatttggcctaaataagaaaaatagtttacgccatttttaagtaaaaattataagtatcttagacacaaataataataaagtaatattatgcatatcatgattgcttttggaaaattttaattacttaggacttaggagaggaaagctttgaaatttggtaatctattactatgtaaaagcaagatgtattgatgagacacttttactattcatagaatatattattttttatttaattatggttcgcttatttatatattgaagttgttttaaagaaatattaaaaaattatatttattgtttgattattgggcacacgatatttattaattttatgaagtaaaaaaagacacaatatttattaattttggtgcaagataggtgtaatatataatttatgaagtttttatattaatcttttgtacaatttcattgtaatttgattgattatttaataaattgtaataatgtataatttttttaaacaaatcaatacgctattgcaaaaatttatatttattattatgtaaaaccttttttatgttattagtgttaatttaatgtatttaattaaatgtaattttaattattattatgtaaaacatttatatttaatatgttgatctttaattctagtaggaattaatcttcgtgctattgtaaatagcaa

SEQ ID NO: 333 - DNA, 4560 bp, Glycine max
acgttttcttttattgaccaatgggtgtaacaactctagtttaattttgggcaactggcatatggaatatataatagtgatgacacataaatatcttttaatgataaaaaaaatttaagcagacattttaagataagagactaataagtaataataagtgctagagatgttcttctaagtatccagagactattttataaaaaaatcaataaaaatagtaaaaaatatatataaaataaaaaagtggattgaaaattacaaaataacactttttttttataatttttcaatcagtgttcttagagagtgttatgttctcaaagatatgtgcatgtagcagctgtaaatgaaaataatccaaagcaaaggaggtgacgtaggaggtacgtgaattggccaatgagcagtgcatctaagtcaagatatgacccaattcaatatttcaactccattgaagtaccttggggagggaaggacagactctgagtctctgacacatggctaacttgcattgtcttccaaacaaacaacaagccaggcccaacgtacttcatgttaatcgtaactatttctcctgcaatgcaagctggctccgcttaataagttttaacacaccttttcctaatataaaaatacattaaataatactattatattgttatcattcctttttaaacttgttaagaaacatagatatgatatgatataacacgagtggtagtgttagtgttaagtgttatcctaagtaagaaatgagagagagggtaacaccttccccaaccctaaaaggggaccaccttaagagcacagccacccaaaagatagataatgtcccagctttagacaccactaaatttccgccacgtgtcgaacagagattctccggctctctcaacgccaccaaaaacagcaacaagtaataagtaacaacaccattcactcactaatcacaaagtcacaaacacattacataacaacacttccttccttacttactttatttcttttctttcttctcttcatcaaaacaccactctgacaacattaactccccgaatgttggatggagaagcaacaatgggcacgtgggctcgcatgtgcgacacgtgccgttcggccccctcctccgtgttctgccgcgcccacaccgccttcctctgcgccacgtgcgacgcgcgcctccacgcctcgctgacgtggcacgagcgcgtgtgggtgtgcgaggcctgcgagcgcgcccctgcggccttcctctgcaaggctgacgccgcctccctctgcgcctcctgcgacgccgacatccacgccgccaaccccctcgccagccgccaccaccgtgtccccatcctccccatcgccgccgcccccggcaacaacgacaacgacaacgtcgacgatgctgacttggacgacgatgacgaaaccgcttcatggctcttgctcaaccctgtcaaaagcgctagtgtccctaacaacaataacactaataatgggttctcgtataatggtgaggttgatgagtatttggaccttgttgatgactgcgacaaccaccactttgcttctgttgctactactacggaccattactctcatcagcaccaacatttcggtgttgtttctcacaagagttatgctggggacagtgttgttccggttcagcaccaccagcattttcagcttggcttggagtttgacaactccaaagctgccttcagttacaatgcttctgttaatcaaagtgtaagccttccaaattcctttttactcttcttctctttttgttttctatcttttcaaaatacggtcaacactaaaacgagaacacttttccactagactcaactctctaatgggtggttttgttttgtttattcatttgaacctcgctaagagcatgtttgatttgcacttaaaaatgattttttttttatccgttggcaatattacttttgtctcaaaagtaattttgcaactaattcattcatctaaatcaagctcttgagtgggggaaattggtgtttttatttaggtttgacttgggatgtggaaaatactattatatactacatgtttcttcttttggggtggtggttttcttgcttttggtcttcccatgacatgtttttgccaaagatggattcacaattaagtagtttcctttcatggcatgttcagttcaatgccaaattcaactttctggttcaagttctgttcactttgtttttgacctggtttatctacataatctgtctttgttgtattgtttgccattaatttgacttgttccgaggctcgcgtttcatgtttggtttaatttgtacagaaatggtgtctcgattcgttctccatcttttttatgctctctttacccttttttttcttttcactttttctctttagtggaaggaatctatggccaaattaagtatcatgctttcttgctatgataagatagttttcctcaataaacatataaaaacattctgccctttttgtgtttttttattttgtttttcaaatgttaaagtagggatttggtcgtttttcatttttttctatatccgatatggatgcagttgcctttccttcattaaaatttattctgtagtatattccttaatttgtgtcctttttagtttaccaagcaaggagctaacaagctgtgtcactcacttgcttggtccaaagccttaaaacttgtatagatgttctttctttgtcaagaaattccctctacttgttcagctgattccatcagttgtgtagttagctagaatttgtagtaccaaatatacaaaccagaacctagaatcaattgttatttgtgaaatgcctgttttatcaaatggtaaaaaaaaatgtcaattattggtctcatcagcatcatagatatgactactggtactgcttagaaaatttatcttgaactcgtgaacatttattaactagtatctgtttcctttttcatcgaaatcaggtttcagtttcatcaatggatattggtgttgtacctgaatcaccgatgagggatgtctcaattggccatacaagaacccccaaagggacaattgacctattttctggacctcccattcaggtgccttcccatttttctccaatggacagggaggccagagtcctaaggtacagggagaaaaagaagacaagaaaatttgagaagacaatcaggtatgcctcaaggaaggcctatgcagagactagaccccgtataaaaggtcgatttgccaagagaacagatgtagaagctgaagtggatcagatgttctccacaacactaattacagaagttggatatggcattgttccctctttctgaatatgctgtgttgaacaaatggccacaagatatcgaagatgctagaggatcatgatcaatagaaatggctaccacttgtgtactaataatgtattttttatgtaatctaattacttgcagttgtactaatcggatgctttattattttgtttattgtcttttgaatgaaacttgtacttgtaaatacagtccatgtattaaattattaaattacagtcaacatatctttgaaaaaaatttattttctcaatttctatcatggtgtgtaattgctagaatgataaccaaccaataacttctatttgtgttatttggtcatttcgtttaggtacaatttcttcaatcaaatttaagtattgaaccgaaattaagggaccgatactaattatcttcattaaacatcattcaggtacactgaacttgactgtagtttgagttttggttgtcatactcatgatcctgatcagattacagtaaaaagaggatagaaatttgaagaaatgaatcataacgcatataattccttaatcatttcttttcccttggaagaatgtcaaaggccaaagcatgttaattatacctatgtttctcttctcttactatttatgtttgcactgttcatcattcctctgcatataattcccgtatatcatcgagagatcatgatgacttttgagttttgacagatttagctgaaagtgagagttctaccttggagaaaaagatgcatttataatcattgattagaaaattaatgactaagattgtaacaactttagagtttgttatacatagtcgtttcatttaatctcaaatgttgattttctaattaactgttgtaagtgtactttatcctttaagtacatgctcaatttagagaagttaaatgtgctttcatagcaatataacatattctaaaagaaggaaagagatgttgtacgatgattgtcttcggaccatatatgccatattaatttttgaaaagttctgcacaattgatgatgtatttatcgcacaaaatgcatgaacttacctttaaccttcctcctgattattttaatctagagataatttggacttggaaaatgagaagagattgaagaaacaaataaagattttttttaacagtgaaaccgtggctacgggctgggttgaagagatatcatggtaacgctttaatttccatctcaaatgaaatatagaagacatgtaacataaga

SEQ ID NO: 334 - DNA, 5039 bp, Glycine max
aaatacacataattatatcttgtgattttttcaaacttagccgctaaacattttattttgatggtgaaaagctggaaatttaatcagacaaaaaggctaagccactaaacatttggaacttatcaaacccaatgacagtataaatttaaccgcgcaaaacacacttttatattaccgaatcaatatacaatattttattttaatgaatcaaattctaaatttcgaccctcataaatttgttttgcaattaacttatcaaattcttttttttttttgcactttaatcatatttttgttttgctatgtcatattgatttaataagagcttttatttggtaattgataattatccatgtggtcataattttgacgtggatggatatttatgtgtaaagcgaagaagacatgactacgtgggagcaactttcaattttgaagatatttaaacaaagacgtttaaaatattatttttcatatatctcaatacgtcttgaaaataactctttaccggaaggagaaataatttcatactggacaaactctttattattaattcaagtaaaaaacttaataaatcatgaatttatattaatttttaataaatatccattgataataaaaaaaaatatttgaaagaaagggtgtgagatgatatttgtcttgatttgaaatagaataataagaggtagttgttgcagttgttagattagagatatccattgtaaaaatatcttcctccttccattcctattcctatgacgtggtcggaattcacttgcagatatttttctatcaaacaaaatatcatctcattctcaggttagtgttccccacgttgactccattccctcttcatttgacccctcctttcccccacaaactacgaaactgccacagccccactcgtagtaattcacgcctctcccgggggcatttccgtcacaccactccaacatctttaatattgtcagagaaggaagggaagcagttgtgcagagattgttgaatcatcacatggctgtgacaaaagagaaagaggatgttcggaacactgggaagagattgaaatgcatgaggaatgaagaagaagaagtttatgaagaagaagagagtgagcttcctttaaagccaggatttttcttctacccaacaacacccacttcctttgttgtatctgatgctcttgaacccgattttcccatcatatatgtcaacaaggtctttgaaatctccactggatatcgtgctgacgaggccctcggtcgcaattggtaaggattttcttccttttctctctcgtttccttttctccaaattctgacccttttaaatctggggtttcgctcttttgtgcatttcactctaatttttactttattgggttgaaaccctttttcgggtctttcaaatgattctgttctttcagatctatgcttcagttgaagttttggatgttttccattgtgtcatctagttaagatgcggggttctattgtatcaaaattcattattctgacggcttttgcaagctacatttttactgaattatgaatttggttgccagataagtaatgttttatccctcagttgggtatttttcgacaattttgcattttctatggttagctcttctattaaacttcatgtttctccatttctatgattttccaagctgaagtattttttttcactcttttttaattcaatccttttggaacccttgtttttacttttttacaatatggttgcatggtgaaagttgtgatcagctgagcacttctaattttccttgttagtgtcataattaattttcagcgaaatttacgaagtatccaatccaaaactaaatataataaatattcaaatattgtaaaatatagattttcctctgtgtaaccacacacaaaaaaatagtagaaatgtgaatgatttactgtttgaggaatacctttttaagtttgatttttaaaaaaatgggtacttggaattttatgatacaatttttatcatctgtttgggcctgttcttcaactgcctctgaaaaggatttttgataggaggatattgattaaatatgtgactttcctattgtcaataatatagggaagctagctagttaagagtttattttcttttaaatccttcttccaattccttccttattcatgtaataaccgcagattgatttcctttatactgatttgggtcatttttagaaggaaaaaaagtcccaataattgctttgaaatttctcttgtttcagtcggttcttacagtatagagatcctcgagctcagaggaggcaccctttggtggatcctgttgttgtgtctgagattagaagatgcctcgaggaaggtgttgagttccaaggtgaacttctgaatttcagaaaggatggtactcctttggtgaacagactgagacttgcgccaattcatgacgatgatggaactgtgacacatgtgataggtatccaactcttttctgaggcaaatatagatctgaaccgtgtctcatatccagtcttcaaagagacttgcaatcaagattttgataagactggtaaatataatcctaagagtggacaatcattgtacagtcagcaccaagagatgtgtggcattcttcagctttctgatgaagtcttggctcacaacattttgtcacgcttgacaccgagggatgttgcatccattgggtctgtatgcaggaggatccgtcaattaacaaagaacgagcatgtcaggaagatggtatgtcaaaatgcgtggggcaaagaagtgacgggcacattggaactgatgaccaagaagttaggatggggtcgtctgactcgggaacttaccactctcgaagctgtttgttggagaaaactgacagttggaggtgcagtggagccttcacgctgcaatttcagtgcttgtgctgcaggaaaccgacttgtattgtttggaggtgaaggagtggatatgcaacctatggatgacacttttgttctaaatcttgatgctaaaaatccagaatggcgcagggttagtgtgaaatcatcccctcccggaaggtggggccacacgctctcatgcttaaatggttcttggttggtggtttttggtgggtgtggtaggcagggattgctcaatgatgtgtttgtgcttgatttggatgctcaacagccaacatggagggaggtttgtggtggaacaccaccacttcctagatcatggcatagctcttgcacaattgaagggtccaaattggttgtctccggcgggtgcacagatgctggggtacttcttagtgacacatatttactggacctcacaacagataatccaacatggagagaaattccaacttcatgggctcctccttctcggttggggcactcactctcagtctatgggaggactaagattctaatgtttggaggacttgccaagagtggacacttgcggctacgatcaggcgaggcttatacaattgacttagaagatgaacaaccacaatggaggcaactagaatatagcgcattcacagggttagcgagtcaaagtgctgttgttcctcctcctaggctggatcatgttgctgtcagcatgccttgtgggaggatcattatatttggaggttccattgctggtcttcactcaccatctcagctctttctgttggacccctctgaagaaaaaccatcctggaggatcctcaatgttcctgggcaaccgccgaaatttgcttggggtcatagcacttgtgtggttggagggacaagggtgttggtgttgggtggacacactggggaggaatggatactgaatgagttgcatgagttatgcttggcaagtcgacaggactctgacctgtgaagtgcataaaaccagaccctcttctctcaagacaagattttggttgcaaaaaggttttgggtggctttcctttagcagtttggtttttgtatatgagccactattacatgattgttatatgaaatgacgtgtgtattaccagtgtttttgaatgatatatgatgtcatctggctcctctgtacatcatagagttcttggctgttgtatcatccctcctttttcttttacaattagttttgttaataattaattcatttattattatttttttatattaactctgatatataatattacgaagaaacaaagaaactggcgggtagattcggaaagaaattcaaggaaaaatagttatgcggattaaaagtaaatgaaggcctaaactttagcctatagcgaagttataagctctcgaaatttaaccattgcacaaaaattataggctcttgctatttacacccttgtttttccaagtacatcccataccccctccctttctacctccaattatccattataccatttttcttaaagaagtaatcccttttcctttctaaaatcacatatacttattccagggatgtatctccagaactatgattcatagtttcagagatatatttctggaataagtatgtatttttttagtaaaatatcacttaaaaattaaaatagttggcgaaaaattaaaaaaatgataaatacttattttatatccatatttgttagtcttattttcgtcttatcattaatgttctttaaatattatctaaaatcttattttcatcttatttttattattctttaaatcctaatttttaactaacttcatcatatatttattatataataccgtattttcatcattattatataatattttgtattttccttcatgtgacaatgcaattcaaggtatgttcatcactaatttcatatgacattgaaccattgatgtagacttgtattagaaaatgcatgaatacacttaaaggaaagaaatcatcgtcaaaagctttactttgtaattaaggtgtataatatatgaaattagtgatgaacataacttaaaatgcagtaccacatgaaggaaaacacaaaatattgtataataatgacgaaaatacagtattatataataaatatatggtaaagatagtttaaaatta

SEQ ID NO: 335 - DNA, 11462 bp, Glycine max
aaaacaagcataaattaaaacaaacataataataaacataatctgtctattattctgaaatttctaatgtgacaatacattactcaaaatatgagactcaagcaaaaatgcacatccattaagttaatcattccaaaaaaaatccttaaaaaaatgagattcaatttgatttttttcattacctaatgttgtcacaataaaaattttaaagcaacaaacagattatatgcttattaatcaatgttgtgtttattattatgtttgttctaacttatgtttgtttttctatttttttaagtttttattgtaatattatgcttgcaactattaaaaaagaaatagaagatcaagattaaattatattttgaataaataaccattttctttctttaatgtattgtgcgctgacaaatttgttccttaatgtattatgtaaattctttcattaacgttaattgatgaaagttaattgataaatgaattcatcatactttttcattttcaaagattaaaatttgaattttcatattttgggaacgaaattgtcgacactctacaatttagaaacaaaatgactatttatccttaaatttattaatataataatttcatttaaagttcttgtgaagtatattagcttaaaaattatgtaattaactatttgcaatggtgacaatgagatttgatatttcatcgtgtagttgttttattttaacacataatagattattaaaaaatataaataaacatttacactagtgaacaagttatataattcgcacagataggaaattttaaaatctaaaagcaaacaaaaattgctgtttatggtgctaatttgcacctggaaagatgcattgtttagctaaaacattgacgtcgagtacttggtttgggcaaaaagccattcaagcttagctggtccttttttccttcttcacaaacctctctctctctctctctcatgcactccatatatcgtttcaaagatacacaaacaaagtaagggctataaataggagggatagaagtggaagaaagtctatagcgcagtttcatttctttggattagaaatttttcccaaagctgatcgagaagccagccaggccaggtctgtagtttttctttttaatattaattcattcttgtgtgttcttcatataatacaattagcccttcttcatctcatgaaagaaagcaaaaactcatcgcaagctcgatcattttcctatacttcattttttatatatgaagggtctcatcattttgttctcagacttgcatctttttgtgctaaaacaaaaagggtctttggtctaatttcttcgagctgagaagaagatgcacttcacaagggtttttataattttccttgatccaaaaccactgacacatacatgatatatgcttacaaacaaaattgttttttttttattaatatttttccttgcttcaagatctttttcaatattaatttcgttttccggccagctctttttctgatcaacaaagttgttttaatttccttgagaagcatcttttatatatttacaagatctctagtttcattgactccataaaagaaaaatagaattgaaagttaggaattaaggatctgagtctgatatcattcttgttcttagacttgcatatatatatttttgtgttaaaacaacaagggtcgtctttggtctaatttcttgcggtcgaggtgagagatgtagttcacagttcacaccctagagggagtggatggattttgttgtttttcatataagggcaaagaaagatagaggagctagctagctagcgagcttcaaaactcaaaagcactgacacatacaaacaaaaagatctggctttcataaaattgagataaaagtgcaccgtctccgaatcatgtttataatattatcttcattagatcttgatctcatttttcatctgaaactaaaagaatatatatgtgcctttaccctatttagctatatgcacacacaacttgtcacatatcatattttgttcatcaagtttataattccttatctttgaacttacttacatccaagtaaggtctaagctagctggagttgattagatctagctagctagttttcgatctgcttaatttgttttccatgatctcttatatatagtaattttatttccctttaattaattaagaaagagttgaagaagaatgggaagggggaagatcgaaatcaaaaggattgagaacacaacaaatcggcaagtgaccttctgcaagagaagaaatgggcttctgaagaaagcttatgagctgtcagtgctgtgtgatgcagaagttgccctcatcgtcttctccagccgtggccgtctctatgagtattccaacaacaagtgagttccttcaatatttctattattattattattctcttcggtagaaaccaaatgtttttgtcacaagttttgcaaccccactactatacgtttatgtacacttttgcatgactgtggtctgttatttacccgaagaaattctttttcagatgaactaataattggaactgcagaattactcgtcatctattatgattaaaatggttaattaattaatgattacattactacaataagttgccattaattcttggtcggtctgcgtagatctaggaaattaaaatgtgtatgtgccagtgaactagctgggatatccctttataagattttaagaaaatagggataaataaataaattagtgttctatcttctatccctaattcgaagcaattttatttaacttgtaaagaaacttagggtttatgctaactaataattaagtttaatattctttattacggtacttcttaattacttaaaaaggaagtactttctattaaatacttctatttcttttttagttttcaaaataccaaatatttttatttttgtagtttctaaaacaaatttttaactaatatatgcattaaaagcactcattactaaaagaacttaaagctttgcttatcatttagtattataattggaagcttctcattctgtaaccttttctctatttgggtagatgttcatttcaaggcaaattcgaaatagttctgtcttactgaacaaatttatttagtattcaatgaaatggttatttgtagttaatattacagcgtttttactagttaaattacctttaactcatatttgaggtcatatgtaaatcgataccgaaataaaaatgaaggtagaaagacgataagagggaccaataaatgttttaatgtctattgattgctagaaagagactttattaaaataaggttttggttaattatgaatatcagctcatttggattaagcaatatgttgttatgagaaaaacttcataacttttagatatgcataaatcgaaatgtccattgtattttgatgatttatttggcttatccaaaaagggaaataaaaaagttaatttactactttccgttcctttcgaagtaagaaaaattgaacgcatacaaatccttcattcaaatcattcacttttacaccaaaatattaggctctcggtattattatatagatgaatcttttttgcattagaaaaagtttaattacgatcagaaagaacattttacaaacatgattaatcttccgagatttatcacaaccaaacaacatgcatgcatgtttatttaaaggacaaaaatattattaaaggctttcactaaaattagcagcttaattaaaaaattaatcctagcctccacatttaatagtgtttctaaaaatgtttaacgatcatgtgtagtcatgatttaatgatgaggttgacctgcaacttcagtccctttgaaccaaaagctcagaccttgtaagttgtaacgagaatgcatatatagcagtacactgcagttattactatcttcttgttgtatcaaaacttgtcttttctgcttccactttcggctactcagtgccctttctcatctctgttcatgttgaagtgacagagagtgatgatttcagttgtattgtatacccttagttagggtttggttctctctagctaaaagctcatataccttttgcacggttttgcatgaaaacggtgaaacactggagtttatataggatttccaataacattgtttaaaacatatactacacatgagtacggtgtaggtcaacatttaattgttgatcacatatttcaaaagactattactatggagtaatattctagactacgaatttaagtttcatcatgttttaacttttttcaatttaggcttcacaatgtactactggttcataaattttaactagttgatatttttaaagctaataagtgcatgtaactttactatccatatcaattactaatgttgatcatgtacactaaatttgactcacctactgagatgtagaattgtaggagacatgcactgagtttgtatcagtagtcagatccaataagttgcaccaaaagagaaccgagccgacctctgcttctcatggctcttctatttctttcctttaaagtgataattaagacatcagaatctgtgcatgtaaaatagagagaaagagaaaagtcaacacaaaaagtttcggtcaataaattatatataaatcacttccgctccatatctcatttctcattcaaatttctctgaaatccaatttccttgctcatacttctttgccttcttcagtgaaaacaaaacacttttctcttctctcttttgtccagagtctttgtccttttgtctcggtctcttatcgatcaggttatgttctaaacggaagaaaagataataaaaaaaaaaacaaaaaaagcaagtttcaatatgtccagatgattgtacctttatcctctacaaaagttcctttgcatcaattgacttcaaaatataagagttcgatggacaaaatttagtttatagtttatcttatttattgattctgttgaaagatatcatgaacttaattaaatatcctagtatatagtttactaataaaaaatattatttgtggttataagatatatacggtttttatccaacttataataaaatgcaagaatatgggtttctaacctagaagatatatgttggacaaagaattttataaatttaaacccctacatgcaatccaactcttccaagtgtaaatattttttaatacaaaagttgtttagtcataattaattctcatatacaaatattacagtcaaataaaataacaaacaatgcagtctcttctcgattgttaagtagcttgtacggattaaacgaaattgtatccaaagggaacaaatcagattagaaaagaaaaagagaaaaacactaaataattaagtggaacgtgacggttccacttatattaattagaaatcgtattcaaaacgcagctgctaatgcttgttgttttccgctccaacacgaaatctttccgctgttgatcgatatcatgagaatgagactgttaccgcgagagcacacacaacgacaccattgtttcaaccatgtatatgaccaatgatcactaagttttgctgtttgagttagggtttaattaaaacctattataaaatagagtttgaagcgtataattagtgttgatccttagaattagagttactatatattttgttgcaacgtgactttttttttgttttaaataacttattctaagttaatattactgcatgatgattaaattctgctactgtaacgtatttttgaacaaatacagtatgaattatcagaataaaggcccctattgtgaatagataatataatataaattagcaccatatggtgaacataatcatgctattcagcctcatctttgactggctcgtgtgacttattagaacttttaagacctacgcatctttctttgagactaaagtatgatttttaagatggacaaattaacacacgcaaactgcaaacatacatatatacaataaaagattaaaggtggggatcgaaataaaaaaaatctgggcgattttatggttcacagaagtttgatctatttaaatatttaattagctaaatgggttataagagaattattttcaaactagaaagatgcgacttaatgcatattttcgtctagctagagtaattggcatgcatctctttttcataatgatctatttcttatttatattgcttggtttaattaccatgtagtaattaataagttgctaacaagttcttcctctataaaaatgagagaacttcttgtactctttcgataatatttctttttcctttttctttatatatgtattaaattaaattgtctatttcatattttgaaatgttaattttagcatgtaatttttcaagtgtctgagttcaattaaaccaattatgtgataagtgaatcagatcttagtcaagtttaagaagaaattaaacttcccttaatagagtttaatataattaattgaatgaacgaataggcctaaaaagatctgaaatccttccaaccccctagcgactaatgaagtgaaagtatgaataacaatgtgaatactgaataatatatgtattatgcaaataaacttctctgattgttcattcttttttattttattttttggcctttgtgattacagcataagatcaacaatagagaggtacaaaaaggcatgttctgatcactcaagcgcgagcactaccacagaaatcaatgctcaggtaatcacatgcatttttatttttactgaacagaaaaactaatagttgtctatatatttcctgaccaaagagaaaaaattctgaaacaagtgattggaaaattaacttatgaaatagtttgaattggttcggttttatgtttcttagattatgcacaattacgttaatctattgtctaattatcatacttgttctctttttgtatcattgtaaaactatgaaaaacagtattatcaacaagaatctgcaaagctgcgacagcaaatacagatgctgcaaaattctaacaggtgattttttattattatcatgattgtttctcttaaaccttctaagcaaaacaatgtacagatattatgaactttatattgcagacaaaacaataatagatataatatgcttgttttgctttttaattatactaattaaaaattagaagcctcatgcaactatataataatgatttatttccctctaatatacaccttttgtaggcacctgatgggtgatgccttaagcacactgactgtgaaggaacttaagcagttggagaatagacttgaaagaggaatcactagaatcagatctaagaaagtaagatgtgtgcatgaaatgttgcaatattgcatgtaattgattgatatgatgaactaatttacacgttacataatttggcatttctaaagctaaagctagttctaccttttaattgagattttcccattagaaattgttttggttctttttaaatctgtattgtctaacgagttttataacaaacgtataaagaaaaataaactacacacacataaaaactcacattttctcacaattttcctttcttgcatcaaaatgattatgtattgaatgataatatgatttaatcttttagctgtccatttgctaatatttttcttgttccttttttgtctttttctctctaactataacagcatgagatgctactggctgaaattgaatacttccagaaaagggtaattcatgaactaattagttcttcaacttctaattaccattacttttctttctttctttttttatggagggaacgggaaggagtacttttatatccctccggcggctaaaatttgttgttatatattatcgttgattaatctgattggcaactgataacatgcattggttaggagattgaactggaaaatgaaaatctttgcctccgaactaaggtaagtagattgaatttctttttcttttcccttcaatattacctaggctaagagaaaatattcatcctaaataaggtaaaaccatttatctggccattaattactttttggtaattcgtttaaaatataatatattttagattttaatatttggaacaatgctttattttttcgaaagtacgaatcaacatttttaatgctttgtttaatgtgaggatatccaaagtgagagaaataaattgtcatttacacacagttatatataatatgaaaatatatataacactgcacaaaatttttggtaaatcaaaatttcttcgatagaaattgtaataggaagaatattattaatggttttgaagagaaggatatgatagataatataatgtaactgaagaaagaaataaagagaaaaaataaaaaatacatgatttttgatttttacatgagtttatatatactttagatattgataataatattacttcctgacgaaattgttatgactatatacagtaatgatgaatgatctcacttccaattttatagataactgacgtggagaggattcagcaagtaaacatggtttctgggccagaactgaatgccattcaggcattagcttcccgtaacttcttcaatccaaatatgttggaaggtggaactgtttaccctcactcagataagaagattcttcatcttgggtaagtgcctagcttctacttttattagctttttcatttccgatcattatcattttgcttttactaaaaataaattttcaaaagacatatacatatgcatgtttaatattaaatagaaaatgttagcaaccctctgcacccttccccgacaaagttgaagaatttgaattcacctaattaaatttaatttactatgagtgtatttagtaaggtcatttataattattttcttatgtcgttataattataaggtttaattgattttttatcatcattaaaaaaaattggtaatatataaaatatccttttatatcattttaatgattaattttattagatatttataattgaataagttaaattagcacctcttaactaaaaagtagtatttttcaacttttaattttgcagcttataattgactaacttatcaattaataattgtatatattcaaattacagcaatataactaataaaatcactaagattagtcgcgtgcttatcactaactcaacttactactgaaattatctatctgtattgccccttagaagatcttgtaacagcacagatctcaaattttccaggtctacgtaattaaagaccaaaacaggatacgaaattcctccattacatagaattcgtgcaaattatttttttaagaaaccatcgctggaattatatagaattcctccattatctattcaaatcatagaatacccaaaaaatacatatcgctgcaattagcgattgaaacctgtgattttaattgttcccaaaatcttgaaatcactggactttaaatccactacatgggtattcggtaattgaattgaaggatggagttaaaagatttttcaattaaaaaaaaaaaggaacctgaatttgtgtgaatgcaacactgcaattttaattcacccaaaaagtatgaatctagaaggtagtgatcttcttaggggcaatatagaagatttcaatcataagttatgggttaaagataggcacatgattggttttagtaattttattagaagcttcggatgataatagaatcaactatcacgatttggtataacttttcctaaaattatgtaatttgatttcatatatatatatatatatatatgagaatgttaatgcacacgtattatttcttttagtattagtgtattaataattaacactataaatattttaaaaaatcattaaatttttttgtatcattaagtttaaagtaagaatattataataatttattatttaattttaaaataattaattttctatcctatttcatctttatcagtattaaagtttcagacactcatgtttttctcttgtaaacattaaattatcaattattttttctctcttaaacattaattagattatatatttatataaaaacaataagtatatatatatatattttttattttgaaactttgaattttgtcgtaatttattacctcattgtaatatacaatttttatttgaataataatattttacttctgacttatttttctcctcatcctgtttcgtgactttttttatgatgcaggtgatcaataatatatgatcttggctagcctatggcatgtctatccaattagccggtggctaaatgcattattattactactcttttggttgctcattaactagaccatgtgatctatatactacttatggattatggatacttatgtatgatgattgtatgatatcataacaatcagttagaaataataattaaaaaatagagttgtgtttgaagacactaagttatcattatattaaggcattatatgaaccacttgaacatacatttatctaagtaatttttaggaagtaatttacatttacatgacataaagaattagtatggtacaactattattgacaatgtataaaagcaatcttattcttgcatcaagtgcaaaaaaatacaataatctttttttttaatttttctcttcttccaataaagtgtcatataaaaccttcaatatatagtaaattagataactgaatataacactttttagtgttaagagacgtcaaatgatttctaaacaattttattccatatcttgtaacaaaaaattaagagaaaatttataattagtaattagtatttttatattagattttaaaatttattttaatttggactgcacgttgaacccattttgcccagataatgtgggtctaaattcaacatgttgacctaaatacaaagcaatgcagtctaatatatatatatatatatacacacacatatggcccagttgtaatatagtcaaagacaattcttaacaagcactcaaaaatctccagagcgtgcatgagtgaatgctttccttatgcagcatttacgcaagagaaatcacatttacatggaaaatattatataaggagtgttaggtatacatttgaagaacatgacctcttgccaatgagacatgaaaattttggtgaagacaaagtcaaagcattagaaatttgtgtaaggctctaaatcttagctatggttagctcataagactaatattgaaagataagaataaaaaattaagctttccaaaacctagggtcgtcgtagagctttggcaatccatatacagtgcaagaaagaatataatagagtgatgatgatgaagatagcagaattatttttttttaattatagaattcattaacattttaattacttaacctgactattctaatccaaaccaactccatgatgatcaagttacggacttgtttgggtttcatatatttaaaatcaatatgccatggtatatgtgtattgaaatttta

SEQ ID NO: 336 - DNA, 4035 bp, Glycine max; identical to SEQ ID NO: 281

SEQ ID NO: 337 - DNA, 27003 bp, Glycine max
ggagagaaactaccaggaatataactcgaaacttaaactcaacattaaacatgtaaaaccacatataatcagtagaacaaaattaaattacatatttaattataaatttaatgcatttatgctttttttaaaaatgtatttatttcaattaaaggttccatcaccaaaaatttgtaaatatatatatatatatatatatatatatatatatatatatattatgtttaaatatgttttgttgcttgtaagtttgttttttaattttgatcctcatacattttttttgtttatttctaattcctataagttaacacttggtcaattcttgaacttatacgttttttatttgtttttaatacatttaagtttgtatttttttttaattctggtttctataaggacaaatttacctggatataaaatatttttttaaagagattaaagttaaaaaaatacaaacttaaagaatttaaaatgaacaaacaaaaattataggatcaaaattgaaaaaatataaaatattttgtcttgtctctttgcatgtgtttcaatgagtgagaaatgaagaatgtgtaaaattaaatatatgtataattagaaattataattaggtttaatttcactttttatttctaaagttgctttttgatgaattttatttttgataaattaactttgacatattttatcatcaattttttaaaaatttgtaaaatttatttttcatgatggaattaatgtaacaacgtaaaagttgaaagtaaaatttataaaaaataaaaacaattaaaatttaaaaatataattattttagtatgtcaacgtgagtttaacaataaaatataaaacttgcatgttttttaaaaaagttgacagtaaaatatattaaaaataaaaaattagagataaaaaagtagagttaaagcatatgggtaatgataatggatgcatgcacatgtacatatgtgtgtagagtaacatggcgtgacagaggataggaggcgagaggaaaatatcattgccacgtatgcaatcaatctaggcttctcagagctgctaaagatcttcctccttctttctctctcccttgtttgtgcagtcttctggctctcactctctatttatcacaccattaaccaccacctcttaaatatattttccataaatcaccaaaatttcccatttttttcacctccatcgtttcacccactgaatcacagttttcttttcttttctttctaacaaaaatcgcttctgcacacacaaggattcaggtacattttttctttctttctatttttcttaattaataaataaaataatatatattttccaggttttgttgttgctgtgttaatttctgaagtggatttgattgtctcttttttttatatatatttttatggtgaatctgagttgttagatatttgaggggcttattattattattttttttacttattgtaattatattttttttggtaatttgtattagcttttgaatcttagattacctctttggccttgagagaaattcaatcctacaaatccccattctcactattattactattttactcctttttcttttctttttttaaatttgattttgctctgtttggcaggattctgtttcagatttatccgtgctctgattttcattatttagaaaacaatttgattattttgtagcgtgttttagactgaaaagaaactttgaaatcaccaataaatttgaaaaaaatacatatattcaagctgcatagggcaactagttgttgtggtaaatatttacaattttctcgagatgcatttggttgtcttcttttgtgcttgctttctgtaaaaagaaagcttcttctgaaatatgatttggtggatgattaattgttggtgatgtattggttactaaggtaaaaaaatatctggccatggtgaacagggaatggtgaattacgatattttaattattgattggtagcatgttttggctagaatttggataattgcttttgattatcagaggcagaaggaaacaataccttgaaagtagatagatgtcgtcggcttcttctttgatggctgcttccagtgaaaggtggattgaccgtcttcagtactcctcattgttctggcctcctccaccggatggtcaacagagaaaggtgccatttcaatcttgattcctccccccatcccttttctgtaatgttcttctctcaaaataaactttaacttcagtgcatttaatgtcagttgcactattatttggataataatgataatattgttttgtttaaagtttcaatgtttggaatgaagcttttagaatttcagcaattaagaaatggaaattctctatgaatacataaatagaatatatatgtgatctattcatcctatgcacttgatgtatatgttaaaggggagaaaaatggaaaatttttattgaaaaagaaaaaaatatttattatactagaaacacataaattatttagtgcttgctttttttaagtaattgaaagcatttaggagacattggctatgacaatgaagataaatgaaagaggcagcagattaacagggatatagattaacaaggttttagagggtctgagtcttgcgcttttggtgcattttgactctgcataagtctgcattttcttctttggtcatgaaatgtttgcttaactcatggtgatttttttcaagtattccatagccacaaattcatatagcaacaaaatgattagcaactttttacctctccaaaagattagttaagggttttttaacagattgaaaatgaaattgttaaggagggggactgcaattctcgatattttcacctagtgattaactcccatcgaaggtctaatgctctaaatggtgttaatattaatggatcctgggttgataatccatctagagtaaaagaggaagtttgcagctttttccagcagagatttcaagaaactatgagcagcagaccagttttgaatggcacctcttttcacaccatcggggatcaggataaccagatgttggtgggcagatttagtgaggaagaagtcaggaaagcagtttgggattgcaatggtgataagagcccggggcccgatggtctcaattttaaatttatcaagctcttttggatgactataaaatctgatgttctccgctttatggacgaattccatgctaatggtatcatcccaaggggagctaatgcttctttcattggcttaattcagaaagtgcctgaccctcaatgcctaaatgattatagacctatattgctcataggctgtatttataaaatcgtggctaagttactagccaatagattgaaaagggtaatgccaattattatagacgatcgccaatctgcttttatatccggaaggcacttcctacacagcgtagtcatcgctaatgaagttgttgaggaagctaagaggggcagaaaatcttgtttatttttcaaggtggatttcgaaagagcttatgactccgtgtcctggaatttcctttcttacatgcttcgcaggatgggcttttgtagtaaatgggttatgtggattgagggctgtctcaaatcagcctcagtgtcggtgctggttaatggtagccccacacctcaatttgccccccaaaaaggccttagacagggtgacccattagcccccttgttgttcaatattgtagctgaggggctaactggtcttatgagggaagctattaagaagcagctgtatgatgagttcttagtgggagagaaatcagtccttgttagtattcttcaatacgttgacgatactatcttctttggggaggctactatgaaaaatgtcaagactatcaaatcaattttgagggctattgaattgtcatcaggacttaaaataaattatgggaagagcagctttggggtgttgggccgttctgaacattggaaactgcaggctgctagttatctgaattgtagaatcatgcctctgcctttctcttatttgggaataccaatcagggctaatccaaggcgttgtgggttatgggatccaatcctaaggaagaccgaatcaaaattgtctaggtggaagcagagacatctatcttatgggggaagagtgaccctcataaaagcaactctaacctctattcctattttctatctctcttttttcagaatccctaatagggtagcggaaaaactgacccaaatccagaggaggttcctatggggtggtggccttgatcagaagaaaattgcatgggttaaatgggatactatctgccttccaaaggataagggtggcctggggataaaggatatcagaacttttaatagagctctgctgggtaaatgaagatggaacctgatgcagcagtataatgatctttgggttaagattctcatttcgaaatatggaggttggagggctctagaggaaggaacatcagtcaccaatgaatccatatggtggcaggatttaaggtcagtcatccatgaacaagctgtgcatggtctgtttcaatctgcaatagattggaaagtggggtgtggggataaaatcaggttttgggaggactgctggctcatggaacaggaacctttaagggcgaaataccccagattgtataatatatcctgtcaacagcagaagcttatccaggatatgggattccactcagcaaatgtttgggaatggaagcttgaatggagaagacacctttttgacaatgaggtgcaagcggcagccagtttcttggatgatatctcgtggggtcatattgatcgttggacattagactgttgggtttggaaaccagaacctaatggccagttttctacaaggagcgcataccgtatgctactagaaggagcagctgatcagactggatgaggctttagaggacctatggcagctcaaaatccctttaaaagcaacaacatttgcttggcgattgatcaaagagagaatcccaactaaagggaatttgtggagaagacgggttcagctgaacaatttgatgtgccccttctgcaatagacaggaggaggaagcctcccacctgttttttaattgtccaagaattctccccttatggtgggaatccctagcttggaccaaaactgtgggagtattctcccccattcctaggcagaattacatgcagcacacgcttatctccaaaggaaagcatctgcaggctaggtggaagtgttggtgggtggcgttgacctggtcaatctggcggcatcgaaaccggattgtgttcctaaacaaggcttttaatggatccaagctaatggatgatgctattttcctagtttggtcttggtttagacagctggagaaaggctttgcacagccctacaattattggtctagcaatttatcaacagcatttttttaatagggtagcagtgcagggttattgtattccctttagattggcacctgattcgtaggacctatggttctgctagtctgctgctttctaccttgtatatttagtacctctggtactcacagttattaatacaaattataattttgctgatcaaaaaaaaaaaaaaggatgtagtacaaaaccttcatgtgactttactgcacaacttaagctttcggaacagttagttcatgacatgatattggagtctctaagaacaaccagtctatagtttgatccttgctgctctcattatcctaatgaaaaagatgagtttcagcacaatataggtgggtccatgcattatccaagctttaaacgcaaagggcacttgtgcgaggggaatgtattggagatacaatataaaaccatacatgtgcctttaactaaggacttaagttgtcgagatagttgattcatgaatggaatgatatggagggatgcatctttgtactttagtcttggcatgaatcagcatacatatgggcccacaatgaaagtagcggcaatttgtatttgacacagtctaactgttagatatttgtgattctctggtattttctgtgactgatggatatcctgaaaatttggaaaactttcatgtatgtcatttcaaatatatatatatatttttttgggggggtggggggtggggggggggaataatgattaacagagaaaagattctacagtggaatccaaagtgcttatggtcggactaagtgccagaatttttaaggataattttctttccagttgcattattttgtggaattaaatgatctttttgctatctcagccaatctctatttttgaggggtctctttgctgataggctggagagctttgttcacttgatgtgcaattcttttttttttaatctctcttttgaggataccatatcttctattgatgaaacattctctgaaatgggattatataatcaattgttttgtaatcctttcttaatgtagtttcacacaagtttcctccataaccatattaagtgggtagtctttcaatattatctcttaaagtttgtattttatcttacatgtaagaaattggaaactgttcaatcttattgtactagcgtgaaagcaacagtcttttggtgaattgttttttttaaagcaggcttttggtgaattgtaacactgtaaataactgtttctcaatctatatgtaaacattttcatgtcttctgttatattcgaagctcattattgttccattttgctgttttttctcattatttatgctttccctaggatcaaattgctgcatatgttgagtacttcattcagtttacatcagaacagtttgctgatgatattgctgaggtatgataagtgcacccatatttactgataaatcttgtgaacttgaatagaaatatatacaaattatttcacaagttcaatgtttttgtattattttttgcatgagaaggcccagagtttttatcaaatgccactcactgttctatattattttgacagttgatccgtaaccgttatccatccaaggatattcttctctttgatgatgttttgggtatttatgctctatcccatgtcagtttaacttatggttgatttaacaaatattgttagcatgatttattatttgtaataacttctttatgttttcacatgtaaatctagcaacatttgtccttcatcatccagagcatgggcatgcagttgtgcttccaattatttcatgtattattgatggtactctagtctatgataaggctagtcctccatttgcttctttcatatcttcagtctgcccaaaaattgaggtataagtataatcccctgctcgatattttgattttatttatatataactcaatttcatagctaaaattctcttgctttgtgtctttcagtttctaaactgatttaatatagcaattattcaatttcagtatctacaaggaggtcctctattattttcatttcttctgtgtataattttgcagaatgaatactcagaacaatgggctctagcatgtggtgaaattttgcgcattttaactcattacaatcgccctatttacaaaacggaaagacaatctggtgaaacagaaagaagcactagtggcagtcatgccacaactagtgaacctgggaaatctgggcataattctttgacacagcaagagaagaaacctattaggccgttgtccccctggattactgatatattgttgtcttcaccagttggtattagaagtgactatttccgatggtgagtgtttcttaacaagtaatagataatttagctctatttatttggccagatgtagttaatcatgtatgcatgtatgttttaactttgcttgcaagtcctaagggtgtcgatggtttgattcactttcaaagcatggtttattattgtttcaagtttggtcagtaccacttgaaataaaaaagaaggaagaactgaatatatttttgtgtgtttctaatacaagccctaatcctcttttatagtctaaatggctaatcctattaaaggaaatagggaaattaacataaaaaggaaagtgaggcaaatatcaaagatatgagatatttacctatcgagataatatcaaagatatttactacacttcctctcaagttggtaagtgaatatcaagtattcccaacttactagtaagttcatggaatctcgctgtagggagtctcttcgtgaatacatttgccaattaaagccacaaagggatgtaggctgtggctatatgatcgttgtccaacttttccttgataaagtgcttgtcaatctctatatgcttggttttctcatgttgtacgggattgtgggcaatgctaatagccggattatcacaaaacaaccttatagggtcttcatactttatcttgaggtcatcaagaatgaccttcatccataacacttcatagatattgtttggcatagttcaaaactctgcttttgcactagattgagttattgagtgttatttttttactcctccatctcaccaggtttcctcccataaacatgtaccctgaggtggatcttctatcaacaatttaccggacttagtgtgcatgtatatacacttccacggataatgtacattctcttctgaataacaatccttttcctgtacttgccttcaaatattgggggattttatttaatgccgacaacaagtgcatattttggggatcatgcatgaattgacttcctacacttacaacataagcaatgtttggtctagtgtggtataaatagatgagatttcccaccgatcttggtattgagacttctctactgttgggcttttctcctcacttccaatcttgtggttctgttcaattggaactctagatgttttacaccctaatttgtctgttcttttgagaatatcaagtacatactttcttgggagataaaaataccttttctggaataggcaacctctatcccaagaaagtacatggaaaactccttcatttcaaactgggttgccaatttttccctcagaacatgcttttcagtctcactattagatgcaatgaccatgtcatccacatagaataggagtgtgagtttgccatcataagaataatgctttatgaaaagggtacgatcacgttgacattgtctgtactttagggatatcatatctgttaggaaccaagaattgaaactttggtgaatcttccaaatcatgcttgaggcaattgtttgtggccatacagtggtttttaagcctgcacactttattcttttcattatgagaatcaaatcctagaggaatttccatatacagctccttttctaggtctcatgaagtaaaatatttttatcatcgcgttgttgtaggtcccagccaaaatgagcaactagaaaaaggataattctcactgtattcgaatttgcaattaaggccaatgtctcttcctaatcgatcccatatgtctgtgccctttgcaactaatctcaccttataccaatgtagggtgccatcaaatttatatttcagtgtatattcacctgtaaccgactgccttctaatcttttgacctatctacaatctagcaggtcaagtttttttttcttcttcttctaatgtcttcatttcttcattcatgcccaaacccagttctcatcttattgatttaaggtgggaattttggttttgttaaagatatgatgtgattagatttaatgtaaatagggaaattgtgaatgcttgtatagcagatttatagggatttaatttcgtatgtttccttaattattgttatcacttgattataaataaattagcttgagtgagattagacacacaattcctgtacaatctcttgtggtatcaatgattagggtttgatcccctcccacatctgtgtgcgaccttctttgcagtttgatcccctcccacatctgtacaacctctcatggtattagtgattagggtttgacagccactgtgccacacttccgtcagtgtgccccttcggccatcgtcgtcactctctggcaacccccacatcaccatacaactatgcacgctcccgcacacgctttcgcctaataggcgtgttacaccctcttccaacgacccgctccagtgctgttagacttttgttttcatagcttctgatggttctgtttccaatttagcctttgtcgtgacttttaccactattccgctgatctcatgcgagaaactaactgggacaacaaactacagtacttgggtagccctatccaactatggttccatatttggtagactcaattgttttactttcaccaggctagacatcacctttgcaataagtgtggtaggtcaattccttaatgccccttgtaatagccattgggatgttgtcatgtgcattttcagatatatgaagacaaaggcaatgacaagattgtttgttactctgatgttgattggacaggatcatcatcaaataggaggtctacctctggttactttgttcttcgagatctcatggagaagcaagaagcaaaatacaattgctaaatctagtgtcgaagctgaatatcgtgccatggcagcagctgcatgcaaaatcacatgacttaagcaacttctccatcagttacaatttgaagacactcgagacaacaagcttatatgcgatagtcaagccactcttcacagtgcaatataatccggttttccatgagcaaacaaacacaaaaaaatagatagtcattttgtgagagaataggtactctcaaaagaaatcaccactgactttgttagctccagtgaccaactatgttcactatgtctctcaagggatcttgcatggattgcatttgttacaagcttggtgcatatggcatatatgctccaacttgagggggtgttaaagatatgatgtgattaaatttaatgtaaataggaaaactgtgaatatttgtatagcaaatttatagggactttgtttcatatgtttccttaattattgttatcacttgattataaataaatcagcttgtgtgtgagattagacacaattcttgtacgatctctatagatttcatcaatggttgcaacaagactctggtgctatgtagaaagagattagtacagacaaattgggatattatcttatataagatacctggaacatgatctttttcctttcattaaggcaattggcaaggcatcaattacattttcaagcaaaaccacaataacactttcaggattaggaattttgtagaggaaaatcgacattaatactttcaaaattaggaatacttatctctagattggacgattgagtttactgcgggaccaaaatgggttcttttgcctttggtacttgttcttgtagaattggcctacctctcctgcttcgtccatgacttcctggtttggtcataggtggttctggattcaacatgacctttctcctagcttcctttcttcaaacttttgagaatacttctcaaatatagggtagtggttttcatgcatgctagaactcttcctcttacttcatccaagtcgcaatcaagaccaaaaaggaacatgtgcacactgtcattttctttcttttttggcttaaatatgtttttagtccttcaaatttagggtaaatttgtttttggttctccaaatttaaagttgatctttagtccctgtaatttgagaaaaacttgttttagtccgactatcctaagactgttaaagatatcgctgatgtggctaacgaattacaagttgtttatatgacaacctactttgattttgcattattataatcaaacaccctacatatttgtttttctttcaaagtattaattctaatgacatttaggccaggggtgtttggccagagggaccataacaagctttttccaaaattacagggactttcgaccaattttaaatttggaggaccaaaaacaaacttccccatctcattgatgaaagacaaacagccttcattaaagggagacacattctgcatggagtgatgatagctaatgaggtcattgctgaagctaaaacaaagaataaaccctgcatgttctttaaggtcgattttgaaaaagcttatgactcggtgtcttggggcttccttaattatatgatgatgaggatgggtttctgtgacaagtggagaaagtggatccaaggctgtctctctagtgcatctgtttccattttaatcaatggcagtcccactagggagtttatccccgagagaggactaaggcagggggatccccttgccccttttctcttcaatttggtagcagaaggcctcacaggtcttatgaggacagctacatctaagaatttattcactagctatcaggtgggaagcatgaaggaggatgtaaatattctgcagtatgcagatgacactgttttttggagcagcaacttcggccaatgttagagtcttaaagtctgttctgagatgctatgagctggcttcaggtctcaagatcaactacaccaaaagccagtttggttgcttgggtaaatcagaggcttggtgtagagatgcagctaatttccttaactgcagtcagatggacactcctttctcctacttgggaattcctgtggggtcaagtcctacaagcaggagtgtttggcaaccaatcatcaacaagtttgaatccaaattggcctcttggaagcacaggtgcctatcgatggggggcaggataactctaatcaattcggttttgacagcattgcctatctacctgctatctttttacagaatctccaaaaaagtagtccacaagattgtttctattcagaggaactttctttggggaggtgataatgtttcttccaagataccttgggtcatatgggacaatgtttgcctccctaagagcagaggggggttaggtattaaagatttgaataagtttaatgctgccttgcttggtaaatggggctggaacttggcgaataatcagcatgagctttgggctagaatcttgttgtccaaatatggagggtggcaatccttactctatggtagaaacagtgctcacatctctccttggtggagggacttaaaatctgtattccagcagcagcaacataatattctaaccactaacttgaggtggaaggtgggtaatggggctaaggttcagttctggttggacaagtggaggggggatgaccttaccctcaaagacaagtatccagctttgtttcaaattagtctccaacaagactctactatcaatcttatgggccaagctgctgacaacaggtgggattggagattccaatggaggagaaatctctttgaccatgagatagatatgatggcagctttcatagaggatattgctgttgttcagatccatccatcttctatggacagtcttatttggagggctgataatactgggtcttattccacaaagtcagcttataatctcttgatggttgattctacctctttagctgaagacactgttttcaggagtatgtggaatatgaaaattcctccaagagcaagtgcattctcttggagactctttaaaaacagattgcctactaaggtcaacctaagaaggaggcaggtggctctatcatcttatagatgccctctatgcgatgaagaggaggaaacagtagatcatatcttgttttcctgcacatcaaccaggagcctttggtgggaggttttgagttgggttagtagagtgggccctttccccattgaccctaaaagtcattttatacaattctcgcattggaacagcaatagacatctagacaagagatgggaagtgctttggatagctctatccatgactatttggaagcatagaaattcagtggttttcaaaaatcacattttcagccccgaaaaagtcatggacgaagctttattccacacttggtcttggctaaaatgcatggacaaagacttccacatacatttcaaccaatggtctactaacttgaaggaagagctgtcttagggggctttctctttttgttatggcttctgtgttttttgtacattttatgtcggatgggttaggcaaatttgccttgtacattttatccttcatccagtacacctagtactgatttatatataatactatatatttttgctgtgcaaaaaaaaaaaaaaaaacaaacttccccagatttgagggactgaaaacatatttaagacattttttcttgaaccaagttgcatccttagggtttttctaatcttcttgatagcattagtccaactcttgccagagggttaccattatatatatcgtaataatggtaacatcttaatcaccttgtttctattgtccactaccccaattgacttcttcctttcatagttaacttcacggattatgcccattgcttgaaaattaagaagtgtagaaagattgaattgtttcttttgattaaaatgtagaatgttgatacatatatatagatcctgtcctaatgaggatatcccaattaaggaaataaagtaagaaattaaaatttaaattgtatacaatcagcctcctaattacaacaattacaatcacaatcctgcttaattacagatcatatctaatcttctcttatataatcatgcaaagattccatctcaagttggtgaagggataatatcattcttagcttacaagtaagattgcaaaatcattgtgtagagtctcttggtaaacacatgccaattaaagccctaaagggatgtgcccgatagttatcacaatatagccgcataggtttctcatactccatcttgaggttatcgagtatgatctacatccacaacacttaacaaattttttgagccattgctcaaaactctacctttgcactcaaccttgccatcccatttagctttttactccttcaagcaatcaagtttcctcccaagaacacgcaatatcttgaggcagatcttctatctacaatcaacctctacatagtctgcatatacttccatggataacttttctctcatattgaagagaagttctcttcctagacttgccttcaagtactaaataatctaatttactacttgtagatgtctttcgcatagaccatgcatgaataattgcctaatcatagttatcgcaaaaacattatctggtgtagtgtgggctagataaataagttttccctatcaatctctgatatcaggcctatttgagctctcccattcctatccaatgatttttcttgatgagctctccatatgttttacgacccaatttgcttgtctctctaagaagatcaatgacctattttctttgagagataatgatgccttttttggatttggcaacttctattttgatatttttttttagcattcataggtccttcatttcaatttgagttgttaacctttcccttaggatttgtttttcaacttcatcatttcctgcaacaatcttatcatttacatagaccaaaagcattgctaatttacttgtctgaaaatgctttatagtgtggtcaccttgactctgcttataccccaaagagagcatagcttcagtaaacatcccaaaccaagcttgcagagactatttaaagccatattgccttctcaacctacacaccttaatacctccataatccattagtgaagtcataccttggtggaatctccatatacacctcctataggtctccatgcagaaatgcattttttacttcaaattgttgtagctctcatccaagtgagctacctatgagagaataatccttcttgacgatattcatctttgctaccagagcaatgccttctcatagtttgctttgtacatccatctgcatcattgtcccatagtcactcagtttatcaacaatctcccaagttttatttctttccattgctgttggaaaccttaattgcagaaaccccttggcccgccttagttgtggcctctttgggggttttctaaactgcaaccttgagggtggtggtttagtggtttagtcctacatcaactagagatatggccaaattaatgtatataagtgggggacaatcctcacccacaagtcggttttgtagggttgagttagacctaacccacttttcaagatggtatcagagcctatcctagatccattgttgggtcacttgcatttggcacgtataggctggaagtcttgggcatgaagggggagtgctagaaaagcctccttaattgcggacaccccttagcttgcctagttgcggcctctttgggggtagcctgaagtgcaatcttgagggtggtggtttaatggtttagttccacatctactagagatatggtcaaattaaagtatacaagtgagagacattcctcaccttacaagccaattttgtaaggttgtgttaggcccataactcactttctaagaattgtcttcatctcttcattcacagttcagacccaattttcaccctcaaggcatcttggatggttttgggaatcctgatgaaattaatagctgaaacagaactctaaaattgtgtagaaagatgtttaatacataacaaattgagatataggatactaagcttggcgaacactgtaatgccaacgtcaccacccacactgcttgtttgtagttgagggacatggtggaaggttctgacaccaattgatgagaaccttgggagaatcacaccacaagctagctgttgtagttggagagcccgaggctttataaacctttcactagaaatcccatgctttcaatgtaggactccaagtctcataccttgcaattggatcctaacaatgtccttatatatcactacacacacgcacacaatgcaaccatgactcaccaattgaattggttacccaataacttactacccctgccaaatcgataactggttcagtttttattacactgctttactttgtataattcagttggaatgtgtagtttaaatacatggatttcattatatatctctcgtttctctcatctctcaacaattacataccactcttaagtcttaaaagatcaagtaggtgccaattgaactacaagcttgtttggcagcttttcctgattgtttaatgaaatatatggattgaactaaataattatctttcaaaacagtgttaaggaaagcatctgaattcatgctcattaggggttacctttgttggtgtatagcataactaagttcagggatacataattccatatttttctctcaatagtgtaaattagaacaactagtatggttatagactctcttcctttatcttgattaaagaaacagcttacttgaattgactctcccatttatcatagtataatgttttaaattatctttttatcctttgagcattgagtatatttttgcttaagtcaatgatttttctgcatgttaacaggtgcagtggtgttatgggtaaatatgctgcaggagaactgaagcctccatcaaccggtacaataattttgataacttaataccggatgctgttctttattttttaaaatgatgttcatccacaatattttgtgaacaattatgtcaaaatatttgagacatttcttcagaaagtggagagtttgtttaagttgtatgtttattttcagtttttgtagcacttaaaatcttgttcaaataccttttaatcaaaggtttttgttcacatgagcttgagttatgtttacactatatgttacttaactatgtacacagaattttgaattccttatgccttcaatctttatgttcatcttcacccctcttatttttaatgcctctcctccgtcactaagtcaaaccaccattttatctgttaatccaaatatgatatgaagaatgcattgaccaattaagtttagttagttaatcttattaaatttctcaaaactgaattaaataattaatcgtattctatccttgaatgaggcaatcattctttttcattttcagacttaaagatgaattttaggttgcattcttatcaattattatgtactttggtttgtgactttctgaattaagcagaagttggtaatcttggcatgcaactcatgtttttgaaagaaacatacttttttgagccatccaaaaatgaggaggaagggagagaaagttctatgcggcaaagagatagaataaggcacttgacagttaagataggaaaatctactaattgctacacagaaatttgttgtagtagcatcattggaaacctcttttggtacttccatttgaaaaagaaaaactcaatctatgtccatagtgttggtgttttttttgcatgcagccattttgtttaaatgttgagatcagagaatggcctacttgaactcaaatacttactgttaaataatttcaaaaatactgaagctattgcatcctgttgcccaatataatagtagaacaccaatgaggaaatttaatataataatagaatacaatgtagaaaccatgaagcttagttcttatatatcaaagttaactttttgttataatttttgtttatgtgattattgtacatttttggagcactaattgattgcacttaattggcattcttaacccaaggcttccatgacgaaacatcctcaatgcactgggaggagactaggaattagttttgtttttttttccattgaaaagctatattcatcaatgaattttatcaaacaaaaatatcattttttactgtcatattgacactgatgtttatgttcgtaattgttaggaagtcccacatcacccgcctcagttttttgggtgcagcttatatatctgttaggcaacttcacttagtgccaattggctttaagttgaaatctgacatgatatcagagtctatagcccatcttagttcttgcctattctagtaggctcgcctgtattggcaggcatatgtggagggggggtgttaggaagtcccacatcgcctgcctcagttcttgaggtgcaacttatatatctgttagacaatttcacttagtgccaattggttttaagttgaaatctaataataatatgataaggaattgacttttttttacctttagcttcttcccgtggttctgggaagcatcctcaacttgtgccttcaactccaagatgggctgttgccaatggtgctggtgttatattgagtgtttgtgatgatgaagttgctcgcaatgagactactactttaacagcagctgctgtccctgcacttttgcttcctcctccaacgacagctttggatgagcatcttgttgctggattaccagctctggaaccatatgctcgtttatttcataggttattttgaacttaatacctttcttgttttttagttgttcatagagttcatctgcctgacaaaatatatatacacctaacatttgcagatattatgcaattgctactccaagtgctacacaaagacttcttcttggacttcttgaagcacccccatcgtgggctccagatgcacttgatgctgctgtgcagcttgtggagcttcttcgagctgctgaagattatgcatctggcataagggcaagtataatcttgatagacagaataactgtgatgctggcattaatggaaacctgcattttcattattatggtttccatatgaaatttaattagacaatcgtcaaatgatatggaactcaggttgtgcattggttcatttacattgttgaatatttggtttttcactagattttctttcacgttctatatttcttaatagttggtgaatctgctagttttcctgaatttttcactttgaattcagaaaatgttagtgaaaatatttttaaaataatgcttggctaaacagatatttataacctcatgaagtataatggagagacttatatttaaaaaaaattatttgtcacttttataacctcttgagaagatttgagggaattctattttgcaacttcagaacaagtgcaacatacaataacaattatgtatgtgtattgcagtgggattactaaactttgtgaaagatttaaaaccaactgactgatgtgtttttcttttctgttatatgtttaatgcagcttcctagaaattggatgcatttgcacttcttgcgtgcaatagggactgcaatgtccatgagagctggtatagccgctgatgctgccgctgctcttctttttcgtatactttcacagcctgcattactttttcctcctcttagacaagttgatggagttgaagttcaacatgaacctctgggtggttatatttcttcctataaaaagcaggttgtgtgcaactttatcagttaacatttttttttcttgattattcttattttttacagtcactcacgtagattctttccatacacttgaaatctaaaacctttgttgttgatcagatagaagttcctgcagctgaagcctcaattgaagctactgcccaaggcattgcatcaatgctttgtgcccatggtccagaggttgaatggagaatttgcactatttgggaagctgcttatggcctgattcctacaagttcctcagctgttgatcttcctgaaattatagttgcaaccccgctacaaccacccatactgtcatggaatttgtacatacccctactgaaggtcctggaatatcttcctcgaggaagcccatcggaggcatgtcttatgaaaatatttgctgctacagtggaagctattcttcagaggacatttccacccgagtccactagagaacaaaacagaaaatcaaaatacctagctggcattggctctgcctcgaaaaaccttgccatggcagaacttcgtactatggttcattcactcttcttagaatcatgtgcatctgtagagcttgcttcacgcctactttttgttgtcttaactgtctgcgtcagtcatgaagctcaattcagtggaagcaagagaccaagaggtgaagataactattcagctgaggatattattgaggacttacaaacatctgaaaaccagaaagtatcaaaaaataggaaattgaagaagcaaggtcctgtagcagcatttgattcttatgttctggctgctgtttgtgctcttgcctgtgagcttcagttgttccctttgatttcatgtgggaataatcgtttagcttccaataatgtgcaagatatagccaagcctgttagactaaatggatcctcccatgagttgcagaatggcttagattcagcaatgcgtcatactcacagaattttagcaattttagaggcattattttcattgaagccatcttctgttggcacgccttggagttacagctcaaatgagatagttgcagcagctatggttgctgcacatgtttctgaactatttagaaggtcaaaaacttgcatgcatgctctgtctgttcttattcgttgcaaatgggacaatgaaattcattccagggcgtcatcattgtataatctcatagatattcacagcaaagctgttgcatctatagtgaacaaggcagaaccattagaagcaaccttaattcatgtaccgatttggaaggattccctcgtttgtgttggtgttaaaaggcagaatcagtgtgaaagtagtagctgctttgcccctgggcagacatctgttgtaccttcagaagattcattcccatcaaaagttgaccataattctcagaaaaccccatgttcaaaggatgcatcagattataccttgggtaaaggtgtcacaggtttctcattagatgcttctgatctagccaacttcctcacaatggacaggcatataggattgaattgcaatgggcaaatttttctaagatccacgctggcagagaaacaagagttatgtttctctgtagtttcactgttatggcacaagttgattgcatctcctgaaacacaaccttgtgcagaaagcacttctgcccaacagggctggagacaggtacaaatacaaatgttatactgcagcatctttatcgtcttctcttttttttttttttgctgaattaatattctttttcttccaatggttgaattatatgtttttaacctaaaatgaaatttaagaaaatttccttgtgatacagcttagttcctgttaatcataaaagttaggttctgaaaagcaagaactgtggatgaggataaataggtgtatcctgtgtacacaagaaacataggaaagacagccaaaattctgaaactgcaacatatgaagaaaattgtgtggtctcaaattttaaaaagcagagaaagctacatcccttaaaatgagcattgaaaattgtttttgaaaataactaaatagctgttctcatcaaaggcagattgttgtaaaatctacagtaaactggaagaagcatcacgccaagacaagatatattgggtgtacttgtaacttatgaatgtaaaatgaaacaaggataggtattaaagaattcatggttgtgttgtttaaatgctacaaattggtaaagattgactaaagaggtattgaaacaaatataataagatatagttactaatgcgtatatgtgtgcaatgtgattgtgtggatccaaatatctcttcgatatccctatttcaagtgaaaaggttctttactgtctatgtggatccaaatacctctttgatatccctatttctagtgaaaaagttctttactgtctattttggatttaatgttatgtaggttgttgatgcattatgcaatgttgtgtcagcctcaccaacaaaagcagctacggcagttgtacttcaggtccaaaattcgtcttatcatgaatggtttcataaattacgtttgccactaacatgaactcctattctgtttagcaagattactttcttttaagaattatcatttttaatacctctgagaattggcttttactgtctaaaaagttcaatagctgatgctgaaaatctcatctatccaatgtttatttgttgtacattttttttataaattattattattacccacatttcatttgtatagtcactttcctgggcttgtttacttgtcaggcggagcgggaattgcagccctggattgccaaggatgatgatttaggtcagaagatgtggagaatcaatcagcggattgtgaaattgatcgtggaacttatgaggaatcatgagacttcagaatcattggtaattgtggcaagttcttcagatttactactgcgagccacagatgggatgctggttgatggagaagcttgcactttaccacagttggaggtagtatgtttcaataagtgtatagttatattgtgtgtgatttctatgttcagtattgtatttaattagtttattaattgttgttcagtaatctctgcatgtgtggttaatcatgtcttctatgagtccactcacatttcacatatttcggaaacctaaaatgaggttctagatgaggtatattgtatagtgatcatgttcattgtgaggtagaaggttcaatgatgtagagtatgctggttctgtagaacagagaggaccttgggattgtaaacttgtcatggaaacctggtttcttggaagagtaagaagcaaaatatagtggcatagtcaattgtagaatcagattatcatgctacggctaagaatacttgcgaacttgtgtgggcatcacttgttggaatcaacttcagaagtactaagcatacacaagctagagtgatagaccagatgctattcatattgtgtttagttctgtttttcatgagccgattgaacacaatgaagaagattgtcactgaggaacttcagcattggctcatttctacaagttatgcaaggaaagaggtctaaaagcctgatactattaaatgttgttagaagaggatagattatatttgtagcaagctgcacgtgattaagaccttaagtctatttaagagggggagtgttaagacaattaatgttcttaaaacaagacccgtcaataaaaattgaagacaccgagccaaagttcattggctaaaccatagttgaaaccatggtcaaatcaacagttatataattttaatattatatattaagtaataaattaacataaaagaatcacatgggtaaatttttaaaaaaagcataaaggaccacaatacaggtccaacaatataaaaaaatatcaatagtagatggttaataatagaacatatgtagatctttatatgaagacctttattaagctcaatataattttgagcaaataaaaaaaacttaaaaagtgaaaataaaattaaaagaaaattcttttctaattggtttcttgcctgattttcattgattttagactggtttgaccagtttttcattgatcttttgctctcctgattttttagttttttcgaagtgactttactgattcactggttttcctatcaaacctgctgctccagtccaaatttatattctatggatataacaatgttagtgtgatgtgcattaatggccagggtttgtctcattatatagtagttgtcaatcttatgagccagttttctaatacatcatgattttctaatttctaacacgaacaaactggatattttgagcagctattagtgacaatgtgaagggagaatttggtgtttcgtatattttgttttatgcttaagctttactgttattcacgtttcaataattaaaatggccagctattggaagcaacagctagagcagttcagccagtgctcgagtttggagaatctggattggctgtggcagatggcctttcaaaccttttaaaggtgaacaaacttccttattggaacttgtaatttagctggactttggtgaatgaaaaatgcaggttaaacattgtaaatctaattctagatttcgagacaagtgaatatttgtgagctaaaattcccttttgatcacttctcaatttttagtttcagtttagttccctaagtttaaaaaaaattgtttttgtccctttaagtgtctttattacgccaaattggtccttctgtcagattaccacactaacaccgttcactttggctgacatggcaaacatccatctaatgtgatatctcttacagtttgccacatatcactatcactaagttgattaagttagtagtaaactaacagaaagaccaacttggtgtaatagagatgcttttagggaccaaagtggaacttcttaaatttgtgacaccaaactgaaactaaaaaataaaatggaccaaaagggtattttagcacatatatgtaaaagggcaatcaagtgcaaaactaaagcaattcatgtgctatttttttcttttgggtctatactgcccatgaaattgttgactgatatgcttgagttgtgaatataccacatgcagtgtcgcctctcagctacaattagatgtctttctcatccaagtgcacatgtccgagctctgagtatatcagttcttcgtgacattttgcatactggttcaatcagatgtagtcctaaacctcggagattaaatggcacccacaacccctcttatcaatacttcaatttggatgtcattgactggcaagctgacatagaaaaatgcttgacttgggaagctcacagccgactttcaaacggattgtctattaactttcttgataccgctgccaaagagttaggctgtactatttccatgtgaaatgaaatcatccatcttagtccgtgacaattttttactagacgtatagaaaaaaaaaagttattgatatgcttattgaactaacgggtttgcaaataagcataattctgctagtcctgttgaaaagagctgcagtcataattctagtatgtttatagaaagctcattttgtatcatgtatgtactgtagctaaactaagtttcaccctgaacttgcttgtgagtctgctctcgatagaacagtcttgtacagtaacgaaaaacgctgtaaccaggtccttttctatattgtctcattttgtgttatgcttatgttgatttagcttgtaatggaagtcatttccaattgtttggattaatgtatgatcaggcaggcttttcttttcttctctcttttaattttgtgagattgttgttggctttcatctttttactagagatttgtgttttttctttattattttcaaagtgcgtaaaatgtttttgttccctggttcaagtggactaaaaacagaaatcaagattaaacgatggaacataagtattgttaactaagtttttagtttttttattattgtttggttattcgataaataagtttttttaagtagtttttaaccttttttaaatcattagttttttttatattttttttatttttattctcaatacatttatttattttcttattatttttttaaaataaatcatgattgtattatttatcattttataatttttagtaatttcaacagttgattttattaaatatttataatttaatatgttaattttttaattaattttattaaacataaataaaaatattttactgttacaaattgcgtatgtggaaattttctgtttaagattttggtggcttttaagttttaaccgctacaaatttgttgtcagtctaaatatttatttttttttaacatttctgctggtttcaaaaatttggtgcttgggtttttttttttccaacattttttgtggtttaattctgctaaggatttgcaacaattaaacattgcttgtccgtcacatcaatttaaggccggacactaaaaacaaaacggaataatttatgaggaattaaaaatagaagtcaagataaaatgaggaataaaaacatattttattttttgaaagtttatacaatattattaagtgaattttgcagtacatttgaaaaattgaaaaagaaggaacatggttataatggcttgaataactatgtttcaaccaatgtcaagtttaaggcaccaggttggtttcaaaactaaacattgtctgatccattgtgttctatcattttctattgtgggtgagtctatataggggacaacattgattctgtgagatatacaaagggtaaattgacaa

SEQ ID NO: 338 - DNA, 4236 bp, Glycine max; identical to SEQ ID NO: 285

SEQ ID NO: 339 - DNA, 8721 bp, Glycine max
tgtttgacaaaaatgtcaataatttttttggaccaaattgtcataaattttttgtggaaccaaattattgggaagtcttggtatatgggatatgttcatcttttattcataatatattctgattaattattataatttggataaatttataatgattggtacaatgttataatgtttatattggtaaattggtagaatatttattgtggataatttctattgtcacaaacaaattatgattgtcaatcaatattatgattattattatgtttgttttaaattatgctttccaaaatattttttaagtgattattgtaattttatgtttgtaatgataaaacgtgtacaaatttaccctaaaattatattttatcctaaatgaaacaaaatttgaggtctaacaaaaaattattgacatttacgtccaataaaaaatttctaatattttgatacaacacactttttttgatattttggtctaataatgataactcactgatattttggtttaataaaaaattatattttatccctaaatgaaacaaaatttgtaatctaacaaattagttcaatggaaagatactgatatttaggttcaacaaaaaattaaacttactagcattttggtccaataaaaatatagtgatgttttggttcaaaaaaattattaacattttccgaaaaaaaaaattactaacattttcgtccaataaaaaattactggcatttaggtccaataacgataaccaattgatattttcgtctaatttaattagcatgatcatgttgagaatcaatttggtgataaaagataaaaattaatagatgaataaatttgtcacactttttattttttgaaaactaaattttaaattttaatctttcgtgaacaaatttatccgtaaaaataactgttttaaaaaaatataatcatattttatttttggtccgaatctgttgcttgacttttggttcttgttattcaatcaaacattctaaaaacatagaaccataaacaaaacaatattgcaaaaagttccctagacgagcttcagggaattacagtgaacggtgcaacaaagtgaacagggtcgtcgtcgttgcgcggatgataagcgagaaagacaccgaattccgataatcaattcttaactcacataaagacctaaatcgatatcatcgcaattgaaaatcaaaccacatacacagcgcaatggatcccccactccaattttcctctccccaaaaccccaaccccaaccccaaccacaacgtgttcttggacccaacctccgattcaatcccaaacctcctccaaaacccgatccactacctctccttctccgtccccaagaaacgccgccgcggccgctcccagcgcaatccggcgtcgtttcgcctccctcctctcaccaccctccctaccgccgccaacccttctccctcagcctccgacgaaatcatcttcatcaacaaagagcccaaaaccgaagccctaatcgccctcaccgctgggttcccagcggactccctcacggaggaggagatcgacgccgccgtgctcccggtcatcggcggcatcgagcaggtcaactacactctcatccggaaccacataattgccaaatggcgcgaaaatgtctccaattgggtgagtaagaaaaccttcctcgattacattccgccgcattaccattcgcttttggattctgcgtataactaccttgtctcgcatggttacatcaatttcggagtggcttcttcgattaaagagagggttcccgcggaggcgagcaggccggcggtgattgtcgtcggcgctgggcttgccgggctggctgccgcgcggcagctcctgaggtttgggtttaaggtgacggtgttggaaggaaggaagcgagccggggggcgggtttatacgaagaagatggagggagggaataggatgtgtgctgctgctgatttgggagggagtgtgttgactggtacattggggaatccacttgggattgtggctaggcagttgggtgagttgcttcataaggtgagggataaatgcccgctttattgtgtgaacgggatgccggttgatccggatatggatgtgaaggtggagtctgcgtttaatcggttgcttgataaggcgagtaggctgaggcagctgatgggggaggtttcggtggatgtgtcgctcggggctgcgctggagacattcagtcaggtttataaggacgcagtgagtgatgaggaaatgaatttgtttaattggcatctcgcaaatttggagtatgcgaatgcggggttgttgtcaaatctttcgcttgcgttttgggaccaggatgatccatatgatatggggggagaccattgctttttgcctgggggaaatgggaagctggttcaggctttgtcagagaatgtgccgattttgtatgagaagactgtgcatatgattaggtatagtggcgatggagtgcaggtgactgcagggagtcaggtgtttgagggtgatatggcattgtgcacggttccattaggtgtgttgaagaaagggtttatcaagtttataccggagttgcctcagaggaagcttgatggaataaagagattggggtttggtctgctgaataaggttgccatgctttttcctcatgtattttgggagatggatcttgacacatttgggcatctttctgatgatccaagtcgtcgaggggagttttttttgttttacagttatgtaactgttgctggtggtcccctgttgattgctttggtagcaggggaagctgcgcataagtttgagagcatgcccccgacagatgcggtcacacgggttctccaaatactcaagggtactcttcttatgaaagctattaccttgatattttctttcccatcatacttcggctatacaattaaaacataggatgtccctacaaaataaacagaaaaataaattagaagaaattgcatgtctattattaacatagtttacatgttttcctcaatttcctaacatgtgtgtgggccataaatttatatatttaaattaagttgtatcttttcctcattataattcagcagtcatacctcttaattttcatttaaaaagattccaaacttgtcataaatttcttaatattgattatattgattctattttattttaggaaatatttatgaagcaaaatgtttatctctctacaggtatctatgaaccaaaaggaatcactgttcctgaacctatccaaaccgtatgtactagatggggcagtgatccattctgctttggttcttactctaatgttgcagtcggagcttctggtgatgattatgatattttagcagaaagtgtgggagatggtagacttttctttgctggggaagcaaccactaggcgctatcctgctactatgcacggggctttcctaagtggtctaagagaagctgctaatatggcccaccatgataatattcgaacactgaagatgaaagttgataaggccccttcaaatgctcattcctgtgcttcccttcttgcagatttatttagagaacctgatatagaatttgggagcttttctgtcatttttgctcggaagaatacagaccccaagtcaccagcaatcttgagggtaacatttaatgaggctagaaagaaatgtcatgaagttgcaaaacaggaccaacaacactcaaacaaattactttttcagcagcttcagtcacattttaatcaacaacagcagcttcatgtttacactttattgtcaagacaacaggttattgacctaagagaggtaagaggtggtgatgaaatgagattaaattacctttgtgaaaagctaggagtgaaactggttggaagaaaaggattgggaatgaatgctgattcaatcattgattccattaaagctgaaaggggcaatcgtaagcccgtttcaacctctctggctcttaaaccaggtgggtgatatacataatgaaatactgtttttatcatttctatataaatctttttgaaaacaggaaataaagtgaaagcgatataacgattttgtaattaattatgaagtcataaaatgaaaatggaaagtggaaaatgttttcacaaaccaaacaagctgttaacttttctttgcctgtcattttttttattctttctcctctgtggatgcatagttgctaaagcaatttaaataatatttttcttgatttatgaaaggggtgtcgtcaaagctaaaggcggcgggcattatgaagcgcaagttagtcaggtttgagctgaatttctttatatttatataatctcaccatctcaaacatcattattctatttgacgtgatattgtaactttattctattggtcaactcagaagggcaaaagtggtgaggaaaagcaatgggtccataaatgtgcggagtgccatcaaagtatctgaagaggttaaaataacaaatcaagtgcttcctgatgtacctgtttcaggtaattattttataaagaaaaaagtaattttatgcacagtatcccctcttaaaatgcaaattctttagagttacattaattgtattataatttgttttaagttcttgcattttttttactaagttcccatagttgccttcgttatgaaatactattaatattttttccaaagctaaattaagatactgctgacttttagaacttggactttcagtttggcatgcttaagatgagatattgatgttgatttttgtgaagagcttttagatactgtattttctatgtttgttggatgtatatatacggtcagaacttgaacctgaatgtcaagagtcctgaattcttgttattttattgttggcttttatttttttcttaaggtatgctctcaaaatattatgaggctttccctatattccacggtaaaggctgtatgttatcaagcagaatacttgtttcccccttcctatctattctgctgatttgctatatcagtaaaagattaaattataataaagttggatggttatgttatccttgtgtctctcaccctctccctatacagcaacaacaacaacaatagccttatcccattaggtgtggtcgtgtgtaaacatgagagtagtggtatcttgctagaaacatgagtagtgggttgcagggtctatttttttatccttaagggcactatatggatggagtcatgtattatattgttatagataatccaactcgttactatctcatcagccagctgctttccatactattttattccccttctgttcttaaatgacttctcattattatctcttatctttacacgctaacaaacactttaattttctcactcttctgcagctgagtatttgcatgttcatatatatatatatatatatattttatatttaggcaccctaatttattgctttagtgactttttttttctgtttactatttggactttggaggataacttacccttcccctagttgcacctgacttttatgcacaaatttttgtatctcatcaaatgaacaagggtatatcctttacacccttaataaaatttcacagattgccagtgtaacttaaattgtgtgttgtagttgttaaatagcagttatgatgctgccataacataaacggattaacattgtgcttttgatgcccactttcacttgccacccgctttgtggtactttccaacattttccattgtgcagctgccattgccatggtgaatttgtatctttgttttttattctttctaaatcctttttgagtttcaaatagggtttttaaaacctttgttcactcatctgtgttagcttctcccaatttctcttgggataatagccactcatcttctcccttcaccatctgttgatgattctgactccaacaacccaaactttggcaaccaccttctgagttaaatatctcctttcctcttttttcatcttttttttcctgcttcgcaaatcacaatttcttctctatttttcttgtttctttatttttttttgtcaccaattttttttctccttttttttgtttctcttattttgttggtctgtttattttttttccttcatcattcattcacactactaggacattttttgttttgaagcttttatatttcttgttagcattgttatgagattttatgcttatgttttgagactttgattaattttatttcatagaatatattcgtgagtttgttgtcttcattttatatttgtttttagttgttattttttgtatttagcagacttgtaacacatacagtcacacttattgtatggcagattttggcttttcaccatggaccaacatgcaattaataacattggggtgctttaatattatatagtactttgttttgtgtagttatgcagtctgtctgtatgaaatactaacttcataaatatttctagggagcaatcaaaatgacttgacaaattcataaatggatggccatcgttcacccaggaggtgagacatacctaaggactctgaatccagatagtttttcttggtttaaatttttcttgtattatatgcaataagaaatgaagtcagcagcccaacatttttctatcttattcaattcaatgagaatttcaaatatattatcatttttacttttctaatagattgacttttcatattaaattgcagaaagactaagatgccattcaacttgttctgcccgagtgcttttcttggatcatcctatgtcttggatccttggaagattatctgctatatctcttttgacctttttcttaatgaatggtaacttgcaagaaaatgcaagggaaagccttgcgcaaagcaaaggttgctgccttgtaacctagaagtcactggttcgaatcttggaaacgaacaacatctgtgggggcaaggttgtgtacatctactcttcccagacactacttggtgggagcctcatgcactagggtaatctgtaagaaataggtttcaaagttgtggtaaatatattttgtaaaagaatagatcatcttgcaactaaagttggaggatgttggctcttgcatgtacagaggtatcattctctttgacattctctttgacaatgaaggcaccagtcatctactgaagttttcattcatcaaccttgtggtatgtctttggtggatacagtatctatctgtagtgtttggctggagcatcctcactgcatttgttcaataaagggaagatggtctcttgcatatacctaaagtgttgaagctgatggctctatgatgcagcaaactggcatgtttatatctcttctgaagcaacaccttggcttggtctatgatatgcctgtaatagttagatatgcttgccacccaagagatatagggtgactttgtgaattgggtggctgcattgtgactagtctcattatgctcgtgctcatgtttctgcaagcaacaccagccgttctcaattaggatcacagctacctcctacctgtaaaggcagccaatgaggaacagaaaataccgtttttacaagatattgcactcatttgtgcttgttgtatgatgtatgaggacatgaaaccgcaagctgtaacattctgtgacataagattttgttagaagctgtattttttttttttgttcattttttttagctagtgcataaatgttgggtgccactttggttttatgcagggatggtaattggatttgaatctaagggatacctagaaaaaaatacgaacggccgggaggaaaattacccattaaataggcttacgctcatgtatcagtttcaatattttttgcgacaagtgtgagtatgataatcttattatctaatctttttaatacttgcatagtttttaaaattagaaatttgacttaaaaaatcataatgaatttaaaataaaaatgttaagaataattatatattagtgttattttaaataatactattatacaaattattttatataatatttatcactcattattatataataaaaaagatatttgcgttttctcgacttcaaaaatcaccgatctttattttcgtccttttctttttatattccatcaatctaaacaatacaaaatttcacctatattatggggtacttctgatattttttaatacacttttactattagttaaattttgttaaaaaataaaaaaattataagaccacttaaatatgaagtaggactcacaatcttttgtgattttcgttcaattttaataataaaagagtatgtttagattagtgtttttaatattttcctacttctatttccttatttttttcttcatttctttcctttccattttctttcttatatcactattatatttactttttcttggaatcatttttggattagtatggtatcagagcctctcaacatttcaaaagagggtgaatatgatagtgatattatgaggtgagtaagagagaattgaagacaacgatggaacctatcactaataaaccaaacactcaacttgttgttctaacctctgtcctttctctacctaaagttgctaaaaaaactacttcaaaaactgagaatatgatagaatactcttatgtcccagaagatgcacaaatctttgagactatttctccccttcttagcccatacaatatctttaagagatagagatctatactcaaatcaatctcccgaatcatcactacaaaaagacctccagttaa

SEQ ID NO: 340 - DNA, 7343 bp, Glycine max
gtgcttttcacagtcccccatggacccaaaagggaacaacccagaatgacctgcaacaatcataacccaacacctggatttacaaatgttcccgtgattttcttacaaaaaagttcaatgtacttataccgtgttagtaattataaattacagtactaattactcaatccagtttaaactaaataaataattattctaccataattatagattttataaaatataataaaaaaaatatatctaattaaacattaaatatattaattattgtcatgacattaatgtaaataaggatccttttattattaagattacattaactttcggtttgtccaattacagaccaataattcagcattgctcactatcacagttcacagctattttttctacttggcttcggagagcattccactaactgagaattttttggtacacaaagctacgatattcgttccttcttctaatttcagccataaaaagagaatttttatcattatttttttaactgtttcttttatcagaaaaaaattctgattaattctaatttcaatcaaacaataattaagtctaattaataattatttctattaaaaatcaaactcgaataatactcaaatcttttcgtcttgactttaatatattaattacttaattacaaagaaaaagaaactagaaacattataataaaattattttcgacaaactttttcataaatacaaaatttcaaatatacttaaatgcgaatatcaaacgttgtacaaaatatctatgcgcataagatattttgggcgcgctgttttctgtccccaattaaaaagaataaacagaaaccatgagcggaaaatattaagaaaaggaattagtatttgattaggtgtcagattgccgcttaaagggaataaatcaggtggtgagtaggacgatctttggtgagtatgagaaaaaagaaaagaaaagtgttatgtttttatattataaagtaagtgccatgtaagtacccataaatgtaatgcattttatccggaaagagtagacttggacaagaaaatccagttaaaaaatttagtgcaagaaaagggttctagttctatccaaagggccccacatagttcgcacttttctctttcttttccttatgatccattcttattctttttcctccctcttcttctctcatctatgaggaatccctaaacacaacaacgctgcatctaatccaattctcgtacgtgtgtgtgcttttttctctcctcgaatttgttccctctccttggtcccctcccaacatcatcctcttttgttccgaaattctcgggttctctgctaatttccgccattttttttgtccacaccaagtacttgtgctctgaccggcttccccttccgtaactcgtcactcactaccgcaagctctcttcggtagtcttaagcaattttattttcattatctttttccctttctcttgatttgaattctgatatttttgaattattgcatctggcagcaagatcgagcccgtgcataggttctccgggtacccaattgaaaaaagttgagatttgatatcatatccagaagtgagtagattcgatactcacgagttcagttctgtacgtccatcacaatcacttgcttgtttaatttgattgtaaattgtaattgctattgtgtgagtgagattgatttggatttgtggataagagaatcatgtattgcaatttaacataaaaagacaagaaataaagggaagtttttttttttttttttattattaggattaggattaggaagtgtaaggatgaagagagggaaggatgatgagaaggtgatggggccaatgttccctagactacatgtcaatgatacagagaagggaggcccaagagcaccacctaggaataagatggccctctacgagcagtttagtattccttctcaaaggttcaattcaggtgttctgccactcaacccaaatatttcaagtaatacagttccccctgcatcctcaagtctggtaatttttgcattctgttactgtgacttttgcttatagtcctaattattgttgttatgatttttgtttagtattttttagcataagagaagtttaatttgccaatttgtgattcactgattctattcctttgtatgttctgactaatagttggtgttattctggttttgtgtgtgcgcgcaatggttgtgtttctttctgaatgcttggaattggattaacatttttgcagaggactgtccctgagagaaattgtgtctaccctgttcatttgccaccacaaagacctattcatcgagctgaaaaatgtaactcacgccaatcagaagggacaaatttgagtgcttctcttgaacagagaaagaaggtagatgaagacgactttagggttcctgtatactttcactccaggactggtcaatgtaatgataagagtgttgagagtttcaatgggaaaaaactcactcctacaggctctaggtattttggtggttccatatcagggcaaagtgattgtgaaagagatccaaagcagtttggctcctcagttgtcaatatgagaaaagatgtcagaagtgagattgatgtgcttccacaagtaagtacaagtaaggagcaggcatcaatgtctgtcagaagcatatcgactagagaaaatatccacaccttactaaggcaagccaaggtgactccgaatcgggagtttcaagattgtcatgtatcaaagtttaacagattacaacaaggtgagacttgcttacagctggagtgtggagtggagtcccgatccaatgacattggagataatggttgtcttgttgaatctgcaagggagacagacaagggaaatgcccctacagcaaaccaaactagtccagctgatgcaatcaatgacactgaacatcatgataccaggatgggcagtccgatacagaggggaaacttaaatgaaagtgacaatgcttccaagatctccatggtagaaaatttgtcgacagtgagaatttcgccagatgatgttgttggaataataggtcaaaaacatttctggaaagcaagaagagcaattgccaagtaagtcatgttgcttgccaatagcattggcggttcctatggtggtcttaaagaagtattttccttgtgaaatatttttctgtcatataaatagtgaattattttaattgcttggacctgacaagttcttaaatgttgattttgtgaatattaatatccttaacttgctttccataaacaaccataaagatttagaatacaaaacccaaaagccctatttttggtggaagcttgatatgtccactgattttatcatcttgattttggtggaatggtgaaatttcttcatacctttcttatttttttcttcatggttgattagctaaaatatgtaaaaaaattcccttggaatttttggaaactgttacttaatgatttttgttttctgcctttgctacaaatgtaaggtatcctttatgcatcattagttatacactaggcaagtgggctgtatgttttcatttcaattaagttgctgtatatgtggctttgaagaaaggaaatttgattgtcctggggtcccttctaatttttctttttgtacattcaaagtccttagtgggatatggctattgttgttgctgtatacgttcaaagtccttaacagtgttttaatggtgggtactggttacaacagggcagtgagcagtcttaatgttatactatgttggaggggacccttgtgacagcatatcatctcatgattcactgtcttctagcaactggatgttggatatattcctgtcttggtttcctcttgcttggttctccatgtcaccactgggcacttttccttaaactacactgaaggggaccaagtaatggaggatgatcctggatgtatggtggtaggggacacttggagagttatgatgagtcctcaattgaaattatgatgacaaggggatttctgccccccccccccccccccctttctccaacttatctagtgtcttggttttctattttcgattttgggttgggatattttttatgatacactgttgttaattaaggtgtcctgcctctatacctctgactgatttcatatcatatacatgtttttttttatgattttgatgtatatgtgcttatccccaaccccagaaaataagtttgaagttttacaaatttgtccagagtagttgatctattgtgactactgaatgctaatgttcccacaattgtatgccccaatctccttgttatctagtctttatcctggacagggacaaggaaattggcaaatatttcttttgaattatataatgttttttcggctttaattttaatgagccttaaatacaagtttttattgtcttaaaccatgtgagaaggatttttatgatgtaacataggcacgatatctttgtgaaacagttttagttatcatatttatgtcttgttaatatgtcgagtcctcctgaaaaaaccatgttaagatttgtatgatgatatgatataaattgtagaacggaagatattccgcttaactgctaaccggttttgtgatgtgatcggagcctctgattttggtagttagtggtttatatatcggtgcttccatgttccaacatgattatagatagctccaaacgcttaatatttcccttttatttcaactgtatatttctcaagtcctaataggacgagtattgtgcaattttcttgatccaactcctgttcctctctacagtcaacagagagtgtttgctgtccaagtgtttgagttgcatagactgataaaggtaaattatctctggcactgttcagcatctcgtgttagtccaaaatgggaagcttattagcttttcttgcacacacactcttggagtctgttcatactgattaattcctttttatttaagcaggtccaacagctaattgctggatcaccagatattttgcttgaagatggcgcttttctgggaaagtctcctccaaagggatctactcccaaaaaacttgcacttgaatatgttgtaaaacctcggcaacaaaaccttaagcgcaaagatgattctgaaaagctaaatcataaaatggaatgttctgcagagaatgcggttggcaaaacatctctttcatctgtgaaagacggtagccacctttcaaaatgcacccctttccctggaaatcagcaccagacaaatgtggctgctgacagtgggatgggtccctggtgtttcaatcagtcaccacctgggcacccgtggctaattcctgttatgactccttctgaaggacttgtctacaagccatatccggggcctggattcacaggaactggttgtggaggaggatgcgggccttttgtgcctgctctgttgggtggttctttcatgaatcctggttatggaatcccaacttctcatcaaggagttggggttccaccagacactcatcctggcagtcatggttacctccctccatatggcatgccagttatgaattcatcaatgtcagagtcagttgttgaacaggggaaccaattctctgcactaggttctcacgggcataatggtcatttacccggaggagggaaagccaatcataacacaaacaacaaaagctcttgtaatttaccagttcagagaaatggagcaatatcgcatgtcctgaaacatcagacatctaaggattttgagttgcaggagacttcagccagtagtcctagtgaaatggcacagggattaagcactgggcaagttgcagaaggaagagatgttcttcctcttttccctatggttccagcagaaccagagtctgttcctcagtctcttgaaactggacagcatacgcgagtgatcaaagtcgtgcctcataaccgaagatctgcaactgcatcagcagctagaattttccaatcaattcaagaagggagaaaacagaatgactcagtgtagtgatggttcaagtagtttgtctagttcctgtactttcttggagtatgtcatgtaacgagctgttgtatttataatttttgttttggtttttgaccttgttacatacagcacattggtatgtagatatatctggcatatcaaaactggtcaaaatgtaacattattttatggtatcatgttgtttccatacataagtgttcgttttacacagtagtaattgctttacccgaaagagtaggtgctctgcttcctctgtgcatgggaggaggttttatattgcttgcctagaagactagtgattgtcatacacattagctgttattctaattgattgtttcatgtcatcgatctgccagtggaaatattactccactcgatttggatgtgataaatatttagtgtaacatcttttaacattttcttcccatggtaagcgtgcacaccattccaattattagctttagtttcttgaatatgtaattacaacatatcgttaaatcacatctagattctacacaggagtacacgacttgatgatttgaactggactgaaggagaaaattttaatcgtttcgaattttaaaattacaaatctaatgatatcggtttggtatcaaatttaggaacacgtaaattgtgtaaacatttttttaaggatacactttttgttataaattgtgtaactatatttttttatttatgtaattatattatcttaattgttgagactttcatgtttcaccagctctcttctattattttttttcaatttgctatgtttttttgtttcattttactattttattttatttatagacctaatgtctaatgactccatccaattcgaatatgatcaaattaaataaaataaataaataaattttgagtcaatccaaacaaaattgatcagtttgaatctaaataaacttgatttaacctaacccatgctcaattctattccaaagcacagaaacatcgaataaatttcacattctgttaaagacaaatattacattaataatttaatatagtgtaagcaactattaaacagcgacagtttggccgagtagtctaaggccccagatttaggctctggtccgaaagagtttgggttaaaatcccacagctgtcatataatgagcttcgttttttttattaaacttttgttgatattgtaaacaagtttttagggattattttctttttacgtgacttttaacataaccaacaactagttttaaattcatactgttaattttgagattttgatggtaaagacaaactctagacaaaactccaacattaacaacagggatgtttaattatttcatcttctaaaagttc

SEQ ID NO: 341 - DNA, 5106 bp, Glycine max
gtatttgtatgaagaataacagagattagaaagcaacaatcattatgaaagtactattattatagaattctattaattagaaagttgattgagaaggttagttcaaggaagaaagggattgctacatttagaaggggccgaggacaagaccttgaaccattatagaagagaatcttaggctaataatatatttaatagcataacatatatgctttaattttagaatatttattttttaatgatttcaatttgttcatatcttaagattctaggaaatcctagaatcccttcagaactcaagaaatcctaaaaaagaccttaaaaaaatcttaaagccagattagaacccaataaatcctaaaaacctctattaagtgcaatttggtgtaacctaagggtcacacttgtaattaggttcagaggttaaaagctcacccattttaagtagtcatcaatcgagtaatttatagtccctaaaacattgatcaacagaaagacatgaataccctattatacttggtcagtctatccaatcaagtttctttcattattattaccctttcaaaaaacatgctttgtattttttaaattacttatcacctcaattcaccacaagttaatacatgttttaattatccaaaccattactaccttaattggttagacagcctattttgattttcacacctttattttagggtgccacagccaatggcccaataccaaccaatgcaataagcaaaataaaaaaaaaaaagaaaaagaaaaagaaaagtaaaagtaaaacgctgccgtttttgaagtgttggacacgcccacgtggcggtcatatcagtggggcccaaagcccacagccttggttatggagggccctctctctctctctctctctctcttaattattccggccagattccgtcgatctgcggccatatttatttattattattcaaaacgaaacaaatataatataatcttcccacgtttatatatacccactcctatccctctcctcatccttaacaacatttcacgcttcctcctcctctgtttctctcgcacactctgaccctacgtcgttttttctttttgttttccaaacacacacacaccgcgtactacaactacaacaacgccgtgcctaatccttaagaataacaaacaacagccaaccatgttgcattgtctcaacacttcggggaatctaggagccacctgttcggacatgacagtgttggaaagacaacgggaagcaaccatcaagtggcagcaacacctccagaacaaccaaccaccctacttaacggactttaacgttaacgttaacgccgtcttctcttcttcttcttcttcttctcagagtcagggcctggtcatgaatatttgcgctgattccgcgctcggcgaggtcctaactcactccgtcaaacccgacccgggtgtctggcccgaattcgacgccggattcggatcctcttccggttttctacccaccatttcgccaacttgtagcagaggcggagacttggtttcacccaaggaaaacatggccagtgcgaaagaaaacactaagaagagaaaacctcagaactccaaggtagtagtacttttttttttattttagatgtcaatgttagctgttacttttccagataaaaaaaaaaatgctaaccatcgaggttatgttatgagtatgctatggactacggtaaagtaacggtgaggttttgttttgtttaggttgttgcggcgagtgataataaacaggacaagagagtcaaagcaagtggtgaagaaggagaatccaaagtaacagagcaaaccagcaacaagaatggcaaatccaacgcaaataaaaacaacaacagagaaacaacctctgcggagacttccaaggataattcgaaaggctccgaggttcaaaatcagaagccagagtacattcatgtccgagcgcgtcgtggacaagccacggatagtcatagcttagctgaaagagtgagtaaaaattaattaatatactatagcttatttcttataaaaaggaatggagatagtatattgtataattttcttaaagcgtttttgttttgttttgattctctctacttaatgcaaatgttttgtttggtgcaggttaggagggagaagattagtgagagaatgaagtatttgcaagatttagtaccgggttgcaacaaagttgcagggaaagctggaatgcttgatgaaattattaactatgttcagtctcttcaacgccaagttgaggttagagttagttagttactccctccaacttcattcctattcgttagttaaatattattgctccataccaaattaatttactagtctactgttggaatatgctttcaacttttgaagttcacgtgacttattttattgtatttattggcacatacagttcttgtcaatgaaattagcggctgtaaacccaaggcttgacttcaaccttgacgaactatttaccaaagaggtaaggtcattgctgataacacaattttttcacttttttcttctattagtccgattaaataatggttgtggtttcctagtgtcctttgatattatgagaaattacggataaatgctgccagtataattataattaaaaaaaaaagccttgatgttacaacaaaaaaaaaaaaatactgggtggtggattgttttttaaaaccttggtcgaattatattcaaatagtgaaaagattagaattttgaacttgtttatgcattcttgttatttttaatgacataactcttatgtttgatttgattcaattcccacaggtgtttccttcttgtgctcaaagttttccaaacattgggatgccattagatatgagtatgagtaacaacccttcgtatctaccatttaattcagcgcagcaacttgtatcgtgctgtggtggactaataaacaacatggggataagccctccaaacatgggactccgaaggaacattagtactagccctgtacctttgcccgaaacgtttcttgactcgtcctgtttcactgtaggtttttttaccctctcttgtgtatgtaatgttcttctaatgattagtcttgtccaaatattgatctgaatttttttgcactgcagcaaattctaccctcctcaaattgggaaggtggtgatttccaaagcctttacaacgttgcttttgatcaagggcgaacagcatcttttccttctcagccatttacaggtagctacaaatttgtgacttgtcaaaatcacttttttccttagcctgatatcctaaaagtagaaagtagaagcaaagcagagtggattttcatgggtgatagagacccgagagccccacagattactgataagtcctttttccatcaaaatgaaggaattttttttaaaagggatcttttaatcattcacccatcaagccagttgtctattttatttgcttcttattacgtccctttctttcccccaactttcactcctacaaagtggcggtaaaggttttagctgcttgactcaatgcatcattcacggacatatatcatataacaaaaataataataaaaaaaaataaacggttcgaattgctatatataacaagttgttaagttgtttgtgatacaagacaaattttacttgtgaggttggaaatgtatttagtgaaataaaataggtataaagagcaggaagcttctctttttgaaattcttctaattaaggtctttggatgatgagccaaggatcaatcgttttcttgagactttttggccattactacacaatcacccttaatttaagcaatacaaaaatattggtgatatagaaagttgttgaactgggctacttctgaatgtgaattctaaaacaatgtgttgttttatgtctcttgcaggtctagttgaagctagcaatctaaagatggagatgtaaaccagatcgatcatccattataatttgttggtggattaggtcactcggagtgcctttgtcatgattttttcttttttcttttttcgagtacataacatatattggttgtatactgctccgtagaataaataagatcatattaatacctgttaacttcaatcacctgcatttgcacgtttaaagtactatatagatgataataaaaagaaaaataaaataaaaatgaaaaggttgatcgcgatggtcacatgtgtgaccagccacctaatccaatgggcataagggtgttgatggcaacctaccactgctttttcccctctctctataatacgatttttggtaaaacaaacgaaacactaactggaataataataataataataataataataataataataataataataataataataataatcacgtaattcttcggttgtcaattttttacaaataatgttgggggtatcttttatccatagttggttgatagaattggggtgactaacagtaatgttttaattcttttttgaggaaaatagatgctaataaatttttaagtaggcaacctaactcaaaccaacttcgctgcagcaatggtggtaaattaaataaaatgttgagattaatatcaacctttaggttaaataatcttctttttttactgataagattaaatagaaatagataaataggatttggtatcaaagtttattgaaacagctggatgataataaaatcaatgagcgtaaaacttttagagttggacttacattagtgtaatttaaaatggtgtttgtattattctccaattataattggagttttatcttgataatctaagtagttaaatttttttgtaaattatcgagatgaaatttcattagttctagttgaagaaacaacaaaaacaacacatgagatattatatttgttttttaatcaaataattttcacaagtaattcacgtttaactagtagatttaaaggaagtgaaaggtgagattgaagattaacttatacataaaataaggactttacttttctaaggtgaccatctatctaaacataacatctatgaaatgggtcttcgaaagcatccttctccttaccagatgaacatgtcattcgtcaggattgtagaactcaactctta

SEQ ID NO: 342 - DNA, 3750 bp, Glycine max; identical to SEQ ID NO: 291
  modified_base (3359)..(3458): a, c, t, g, unknown or other

SEQ ID NO: 343 - DNA, 5274 bp, Glycine max
  modified_base (2194)..(2631): a, c, t, g, unknown or other
ggatgaaagtgtcatgaaaagaagatatgttgcgttggaaagtcttgagagaacaatttcacgggaatgtctagcagataaaatttgattacagacgagacaacgcgagagaataagagtcgctaggatcaataaattcctgtggaattggttggtacatagacaaagtaaacgccttcccaagacatttttcacgtactaaattaaacttctactatttggttcataatcgtaacaccgccacctcaaaacacaacgtgaacgacaatgaggccaaaagttaacctaggcaattaccacgtaagaagagtgttggttgtccgaattttcatgcatgcctttgcctttccaaacgttcaaatcaggccatcataatcacatagctaagccaacccaaaaaggccactctcacagttgtttaagtaaaactgtaagactgtgaggaccaccctaattaagtatacaccatcacatatatgagcaaacaagcgacgaacccaaaaaataacagtcaaatcaaaggtcaaacctcattttctcaatacacatgaaaaattatagcataaattcaaaatcatcataatcccgattacccttcacataaaagataacttattattattaattctatacaaattaaaaaaaaattaaattaactactaaataaatgaattaaatgatgtaagattatttcaatttaactaataattttatatttaaatttttgatatacatgtgttaaatattcgaatataaaattttattattcataatcttattctactcaaatattataacctcaatactaattaatcatgtgtcatgtaaaaaatgattaacactgtaactataaaataatttctcttcaatgaaaccttctagtttgtttgggggcagtccagtttcatagtaaccaaatggaaagtaaccctgaagagtttcaagaaagatctaactgagacacaaaaggaggtaaggaatcccaacccccaaacagtctcgggaaaaacacccaccccggaatcaaatcagaatgatacagaaaggggcatttcgggaaattaacctctctctctctctttcgccacctttatgccttttgcctttatttccacccaaacagtacaacacacacgcacccttgcactcttcactttccaacccccatggatccggacgcattcaccgccagcctattcaagtgggacccacgtaccgtcctcccacccgctccggcgccgcccccgcgcccgtccctcctcgaatacgcgatggctcccccgccggtgaccacggcgttccaccctgcaaggacggcggctccgcgcgagctcggaggactggaggagcttttccaggcctacggcatccgctactacacggcggcgaagatcgccgagcttgggttcacggtgagcacgctggtggacatgaaagacgaggagctcgacgacatgatgaacagcctttcccagattttccgctgggacctcctcgtcggcgagcgctacggcatcaaagccgccgtcagagccgaacgccgccgcgtcgaagacgacgacatcaagcgccgcaacaacaacagcaacaacctcctctccacggacaccaccaccaacgccctcgacgccctctctcaagaaggtaccatacaccatacaccatacacttattttaaacctaattaacctacacacacataacacactcctcttgctgtagttctaactgtgtcctcgtttatctttttgtgtcattatgattattattatataatactatataatcgttttagccaattaaatttggaacaaaagtttgagttgctaatttatactactgttatattaaactactgttctatgctgtatcatatcataaataaagtcagcagcagatactagcatagctaataggctgagcaacaatttgtttgttattctatgagtactgtatggcatgaatgagatggacttcgtgttatgcgtatatgcaaagaatatctgttccgaaacaacagtctcttctatatatatacacacacacacacacacgttgaagaattagtctttgactctcggtccagaagaattatgtaaatactatatgggatatgatatatgtagggttgtcagaggagccggtggtgcaaggagagacggaggcggaggggagcgggggaaggagcacgtgnnnnnnnnnnnnnnnnnnnnnnnnnnnnnnnnnnnnnnnnnnnnnnnnnnnnnnnnnnnnnnnnnnnnnnnnnnnnnnnnnnnnnnnnnnnnnnnnnnnnnnnnnnnnnnnnnnnnnnnnnnnnnnnnnnnnnnnnnnnnnnnnnnnnnnnnnnnnnnnnnnnnnnnnnnnnnnnnnnnnnnnnnnnnnnnnnnnnnnnnnnnnnnnnnnnnnnnnnnnnnnnnnnnnnnnnnnnnnnnnnnnnnnnnnnnnnnnnnnnnnnnnnnnnnnnnnnnnnnnnnnnnnnnnnnnnnnnnnnnnnnnnnnnnnnnnnnnnnnnnnnnnnnnnnnnnnnnnnnnnnnnnnnnnnnnnnnnnnnnnnnnnnnnnnnnnnnnnnnnnnnnnnnnnnnnnnnnnnnnnnnnnnnnnnnnnnnnnnnnnnnnnnnnnnnnnnnnnnnagctgagatgatgaaggggaagagaatgatgaagggaacattaacagagttgtggtgtgagaggcaaagagaacccctttcatcgtgacagaccctggcgaagttgcacgtggaaagaagaacggtttggactatctgtttcatctctacgagcaatgccgtgagttcttgatgcaggttcaggccattgccaaggaccgcggtgaaaaatgccccaccaaggtatattcattcttcttcgttgagttcttcccataccataccctaacccccttcgtttatgttaatttgtctcctccctcgtgcctttctgcttcttctgatcactctgactctgctactcacttgtgttgttgtgttgttcccttcatgaaccgtttgaataatactgtgttgttgtcaccgtgataaaattgtcaagttccacggaacacgtgactagtcagggactctcgtgagggggtccaccttcccctttaaaactagattttttttttcttctgttccgtacgagtgaagtgaattatccagttacaactcttagctcctaacctagcacatccacccgcaagtcaaagtcatgcatgttccccaatttcccccttccacccactggatcctcgcatgccctcatacgaatcccattcgacgcgtatctttgtgtttgtgattctgttaatttcatgtgcgtgtggatggggtacggttcttattattatgttactattcctattgctgtcacaaaacatacatacatacatgtcagccgtattatttttgttaaaattagtcaagcaaaatatgttacactagctgccaaatataaccaacatggaatggttaatacttgatatgcgtagcataaacaatgtttgtcttttccaatcgctagacaaccttatatctataacataatcaactcttttaaattctaatcatgtatatcacttgtaatttgatacttgtcttttctctttaaatatatcaaaatataactcattaactaatctttgatcatacaacaacattgaagttttgtcgtgattgataatttttggcatcaagatgtatatatatatatatataccaactaaaatgtgggagtgcaggtgacaaatcaggtgtttaggtacgcgaagaaggctggggcaagctacatcaacaagccaaagatgcgacactacgtgcactgctacgccttacactgtctagacgaggaggtctcaaacgagctccgaagggcgttcaaggagagaggggagaacgttggggcgtggaggcaagcatgttacaagccccttgtggccattgccgcgcgtcaaggttgggacattgatgccatattcaacgcacatcctcgtctttctatttggtatgttccgacaaagcttcgtcagctttgtcacgctgagagaaacagtgtctcggcttcaagctccgtgtctgctggcagtgctcaccttcccttctaaatcctcatgcatgtagtcgtgtactggtttagtaatcgtgatagttactagttagtaattaatagatgtgttgaatgaacctggctagctcccacgccacgctatgaaatgaaggatacacacttatatatatagcaatggagggactttagattacgtatctttcataaattacttgttttataattgtacttctttggtagcattggaaggacatagatatagcaagggatatatatattctctttggacgcactgaccactcaggatcaatgactctcctgattaattagtggtacaacaaccactaatttaatttcttttaaaaatatatttatttattataatttaaggaaattaattccattaaaaaacaataataacaataataataatcgtttagtagtaaaaatcacgcacatcatacaaaattctatcaagcataaagctaatatactaatcacatactacgtactaaatataaggactattacaaaaaaaaaaaaaaagcccaattttctatattctcacgtgattcttgttttgaaattgttaatgaaaaataaagaatttttaatgtagaaaaaatgagcaatattaaaaaacttttaaattataatttataatacattttgacatttcttctttgtttaaatcatatcttagactctcacaatgtgattattgaggtgattttggtatctacggaagtcataaacaaatatttacaattctgatacggggattttgaccatcatattcaacattgatcatagaagaaattaaggtaaggtttgaagtttatgttttgtgtaaacaacgcatcgtgtgttcaacacaaccctagtgcataatgtagtactgtagactgcccgacgctgagatggaattcatggacaacaatgcacccgatgtgacagagggggtgcccaatacggttttcatctcttttccatgcctagtgttattagcgttcatcatttgcgattgaagcttaacgaatttaggaatgattctcgaagattcatggcattctcttctttattttctttgctttttccgttctatctctatgaattttcaatttctttacagttaggttcggttagattaggataaatcttgatttaaatcttttgtaattataacttctctttctaaacttttctat

SEQ ID NO: 344 - DNA, 8227 bp, Glycine max
ttcttgttgggtaaaaaagtatacaaaattattgtaaaagtgttatttttttactggataagtttatatcagctttccaagaagtattattaaactttctaatctaatctttggccgtcacggtcctccaatgtggcaaagctcaattatgttcgcacgaccaaatccctgccactactaattccacctcaccaaaatcagaacaaaaaaacaaagaaagcaaaagcaaataaaattatattatttttgaaaagataaaaaaatctccagataattaattactttaatcatattcctcaaagttaaactctatgaaaagtacttgactaaacaaaaaagtatattgagtgtaagtttggagctcaaaaagatgttttcaaaaggattaagaataggcttcatcacataatgaatggaaacacaaacaaacaagtcctaatatgtttgattatatgtttacctaatttaatctgcggcttgctttattccgtataataatgtcaatgcgagtttgtgactcaaatcagagacagttacttttcttcattcaacaaattaaaagtaaaaactataagttggacaaaaacaaattattaagaacaataatgacatagttaacatgactaacaagtgtaataagagtattgattttaaaatactccataaatacacttttaccgatggtaaactgtagtagtaattttgaagaaagaaagggttttgatcaagttcacttttctttcagaagaagccatcgagcaatcgcgtcgcgtgcgagagaaacgccaaacaagaaaagcagcgttactttgctgctgcacctgtcactgtcactctgtcttcttttttttttcactcttcccctccaaaatttcgctaaacaataatcataacctcatgaaaaaaagtgatagaatagagaagaagaagaagaagaagaagtgatagaatagaagtaactttttctctcttctctgcagtggtggtaatttattttccaatggcttcagcaagcggagcggcgaattcctccgttccgccgccgcaaatccacacctcacgaacaaagctgagccaccacagcagcaacaacaacaacaacatcgactccatgagcaaggccatcgcgcagtacacggaggacgcgcggctccacgccgtcttcgagcagtccggcgagtccgggaggtccttcaactactccgaatcaatccgcatcgcatcggaatccgtccccgagcagcagataacggcttaccttgtcaaaatccagcgcggcggcttcatccagcccttcggctccatgatcgccgtcgacgagccctccttccgcatcctcggttactccgacaacgcccgcgacatgctcggcattactccgcagtccgtcccttcgctcgacgacaagaacgacgccgccttcgctctcggcaccgatgtccgagccctcttcactcactccagcgccttactcctcgaaaaggccttctccgcacgcgaaattagcctcatgaaccctatctggatccactccagaacctccgggaagcctttctatggaatcctccaccgaattgacgtcggaattgtcatcgatttggagcctgcgcgtacggaggatcctgccctctctatcgctggagctgtccagtcgcagaagctcgcggttcgcgcgatttcgcagcttcaatctctccccggcggtgatgttaagcttctctgtgacactgttgtggaaagtgttagggaattgacgggttatgatagggttatggtttataagtttcatgaggatgagcatggagaggttgtttctgagagtaagaggcctgatttggagccttacattggattgcattatcctgctactgatattcctcaggcttctaggtttttgtttaagcaaaatagagttaggatgattgtggattgtcatgcttctgctgtgagggtggtgcaggatgaggctcttgtgcagcctttgtgtttggttgggtccacccttagggcacctcacggttgtcatgctcagtatatggctaacatgggctcgattgcgtctttggtgatggcagttattatcaatgggaatgacgaggaaggcgttggtggtcgcagttcgatgaggctgtgggggcttgttgtctgccaccatacctctgccaggtgtattccttttcccttgaggtatgcttgtgagtttctgatgcaggcgtttgggctgcagttgaacatggagcttcagttggccgcgcagtcgttggagaagcgggttttgaggacacagactctgttgtgtgatatgcttcttagggactcgcctactggcattgttactcagagtcctagtataatggacttggtgaagtgtgatggggctgccctttatttccaagggaactattatccgttgggtgtgactccaactgaagctcagattagggatattattgagtggttgttggccttccatggagattcgaccggtttgagtactgatagtctgggtgatgctggatatcccggggctgcctcgcttggggatgcagtttgtgggatggcggttgcttatattacagagaaggattttcttttctggttcaggtcgcacacggccaaagagatcaaatggggtggtgcaaagcatcatcctgaggacaaggatgatgggcagagaatgcatccccgttcttccttcaaggcgtttttagaagtggtgaaaagccgtagcttgccgtgggagaatgcggaaatggatgcaattcactctttgcagcttattctgcgtgactcgtttaaagatgctgagcatagaaattctaaggctgttgtggatccccatgtgtcagaacaagagttgcaaggggtggatgaactaagttctgtggccagagagatggttagattgatagaaacagccactgctccaatatttgctgttgatgtcgatggccacgtaaatgggtggaatgcaaaggtttcagaattaacaggactcccagttgaggaggctatggggaagtccttggttcacgatcttgtgtttaaggagtctgaagaaactatgaacaagcttctttctcgtgctttaaaaggtatcctttctaacactctggcattctggtcaattcattgagtatatttggtaggagaaccctgtgccttctggaagagcatgccaatctggctatttttgtttggcaaaactatacttgtaaacatgatggctagatgtttagtaggtgcacaggatacttaatggtattggagtcaactggacagtaataatagttcatagcacgataaataactgccttttccaaattatccgatgttgtaaacaactatgcacataatggttcagtcattagtaattcaataaaaacctcaacataggcataaaattcaactttgtaacaatgcaaagcttgtaaaagggaaaaagacgaaaagaaaatatttgcagtccaatatagttttcattctacgttggttagcattcatgtcatttaggatctagtgtctgcttgattggagtaagaggctactagtgcaaaggtggagattctggaattaatatcattttaactcttgcttgatataaaaaaggtatgatgttttagaaaacaaaatgtactcagtttcacttttgtgctttcctgcattccaagtactcaatcaggcagactgtatttcaatgaacttagaagtaaattgttgcctactctataaactacatctagtttggctttaggagaaataaggtattgataatttggttgtacaatgacataacttaaatttaattagtacaggtgaagaagataagaatgttgagataaaaatgaggacgtttggcccagaacatcaaaataaggcagtgtttttagtggtgaatgcttgctccagcaaggattttacaaataatgtagttggagtgtgctttgttggtcaggatgttactggtcaaaaaattgtaatggacaaattcatcaacatacaaggtgactacaaggctattgtacatagcccaaatcctttgatccctcccatttttgcatcggacgataacacatgttgcttagagtggaacactgcaatggaaaagcttactggttggggccgtgtggatgtcattggaaaaatgttggtgggagaggtttttggtagttgctgtcagttgaagggttcagattcaataacaaagttcatgattgtcttacacaatgcacttggtggacaagatacagataaattccctttctcatttcttgatcggcacggaaagtatgtacaaactttcctgactgcaaataagagggttaacatggagggtcagatcataggagctttttgctttttgcaaatcatgagtccggaacttcagcaggctcttaaggcacagagacaacaagaaaagaattcctttggtaggatgaaagagttagcttatatttgtcaaggagttaagaatcctttgagtggcatacgctttacaaactctcttttggaggctacaagcttgaccaatgagcaaaagcagtttcttgagactagtgttgcttgtgagaagcaaatgttaaagataatacgcgacgttgatcttgaaagcatcgaggatgggtaagttttctatttaatcctttaacaacttttggttgtcctggaagagtgttaagaattatagaacttggctatataaatccaatatccctctcatgtcacgtgaaagcttgctagttttgaaatgtgatgacttacagaataacaattcaaagttgtatagtattgaaatataatagctaagtttttagaacaaatggtattttgacatgggactagggaccgagttagtcctaaggttcaatgttgctccacagtactgtaactaaaatgtcaatgtaaagttgcctgtaggtccagactttttgatttgtgagcctgatatctatatatatttaaggccttgcaggttttcacgtgtgaggtatgttggaattctaaaagctatctgaaaggtcaatgggtttttttcacttgtgatatgattcatgaaggcatcctattgtgcaaattgagtattgaatttgcacttgtcacccagcgtatttgatggttttatgtgaaattaacttctctagtactgctaaagatataaacctaacatagttatcaagttcattatatagttatttttcccttctgataagatagtcctggtactattagatgctgatgactggttgatgctaaagaacgagaacatgagaattacttaatatctgatattgatggggtgggcaaatatcttaaggcctgattactttgagaaaacatttttttttttgtttcttgtttcacttttaattacagtattttttttttctgttttcaaaggtttgtacaagaagcaatgaaaataatttttaaaaaaactgttttctagttggctttgatcatatctatgttttatcgatatgacatgaaaatttcaattttgctttgatctgataacataccgaagcatctaatagtttgtcaaatgccctgttttttacatgtttgccaatgatgtgtatggatttcacttgtcttgtatggtgctcctaaatagactaagtcagacaaagcacatgtcactcataaaaatatacactaccttctcgctaggatatgcaaatttttggagttggttggtatctgtgaatatcaataatcaattctatctcaatataccctactttgctagtgggttgctattttcatttcatgttttggttcctttgttagtttcctctgtgtgcttacttgctttaatgcctctataaacttactgcattgattatcttttgagtaaggtgtgattcattttttgttttctatttggggttaggtccctggagcttgaaaagggggaattcttgcttggaaatgtcataaatgcagttgttagccaagtaatgttactgttaagagaaagaaatttacagttgattcgtgatattcctgaagaaatcaagacattggcagtttatggtgatcaattgaggattcaacaagtgttgtctgatttcttgttgaatatagtgcgctatgcaccatctccagatggctgggtagagattcatgtacgtccaagaataaaacaaatctcagatgggctcactcttctccatgctgaatttaggtattgtggcaagatcttcaagtaattttcattatttttttcttcaagagtttatggatgataatctaaacctcaaataagtgtttttaagagccccaggtataaatctgtcaaaatatgacaatataacaattaaatattctgaaacttattgaaaaatctaagtttcccatctgaactcacccctcaacagagcgtgcttaatttttaactctctctggaagaccctggagatagatgtgatatttttatccactactgttacgatctcttgccattccatgtaatttcttgaaaagagattacacaaaagaagaaataactgttcttacactacaaaaagaaagaaagaaaaatataaaaattgcaattgctgattattagctaaatgcattctatacatttagcaacttgtagtactaacctgttttctatatattcaatttttacttggctgttattattttcgagtggttaatatttgtttgtgttatattttttcttttatgaagaatggtatgtcctggtgaaggtcttcctcctgaattgattcaagacatgttcaataacagtcggtgggggactcaagaaggtttagggctgagcatgagcaggaagattctaaagctaatgaacggcgaagtgcagtatatcagggaggccgaacggtgctacttctatgttcttcttgaactacctgtgacacggagaagctctaaaaagtgttaaatatgtattctgtagctgtaagattaagtttaaagccctggcattgcccctcatgctgaccgtagatagtttgttgttatagattatgctctcacctaacaaggcaacttaaggggcaagcatttgaacaagctgatttggctagctatctcagtcacatgtaattctaccaaattggactgttgttttgcaccctgacaaaacttgttcggtacagcaagagtggctagttaatatgtggctaaatgtaaccttaaatcttactgataaagatatggcagagtagatgaaatgaagtttcgccaatatgcgcacatgtttatggccaagtggagtctcctgtgaacattttcaagcaaatgcttacatcattagcagctgtagtgaactccaatctatagttggattgaactgcatccatctcctgcactgttgtatgttctgatagtaactgcttataccaaatgcgttcccaagtgggcaaataattgtaaaatcttagtctccaacaagatttgccatctgcaatgttgctttccaactctccaccttttttttttccatcattgcctgtaaatccctacctactctgtaataaaagctggattatttatcccgtattttttttttaatttcgtgaaaactagcttttctttaataaaaaaaatgaaatgcacttatctttctttattgtctttatttttgagactgtgtttctgagatttattttattccgcaacacattagggagcgagtgaatatccttagagaactccaaagctgatgttactggatggtttgatgagcttgaaagcttttgtagtgtttttttcttgtatcttgagttcaccattcaaacatcacaattatgggaattgcttatttttatatatgagatcatgagggtgagtacgaccagatactgtttactaaataacactagttgaacggatcaaataagggattgaggatgttctaattgaaatgaacataatgttgaaagtaaatccacttgaagtgaaacatagttaacaacgacttggttttgggtttttcaacaatcaagagaaaatttttaggatgacagatttgatggttaagtcttctaaggaaactactaattgtgtggttagttaaaataaaaatcattcatccattacataatataaattcaagtacatcaacatcctaattcagtaattagggatttagtgataaattatgacaaaaaatgaaaagagaaaagaaataaaaaaaagagaggaactttattaatgaattgatgaggaaaggtgtacttcaaatgcttta

SEQ ID NO: 345 - DNA, 23411 bp, Glycine max
gtttaaattacatagttaattataaatttaatgtatttaattcaatttaaaggttccattacgaaagttttaattaaacacataatttaaatagttggttttaatttaataagtatagttaaatattttaaaatatatatattttttctaatttctatcgtcatacatttttttgattttgtagtctacgtaagttgattctttgttaatttttgttcatttaagcttttttaattatttagatttgtaggttttttattggacaaaaaatatgaacttacgagaatgaaaaataaaaaaataaaatttaaaggaactaaaatttaaaaaacacaaacttaaatgatttaaaatcaacaaaaaacaccaaggaaccaaaatttttaaaaaatacaaacttatacaaattaaaataaaaaaattatagaaccaaaattgaaaattttgaaaagtgcaaactttatggagtaaaaatatatttatttattaataatgttgtgtcactttatcatgtgtcttaatgagcgagaaacaaagatagtataaaattaaattaaatatagattgaagtatttttcagttcttgtaatttaatttttttatttttaattcttaaaatattttagataacgttttcaaccgtaaaaaataatttatttaaagtattataaaaataaaaaataaaataaacataatttataaattctaaaaataaaaaaaataatttataaggataaaaaaattaaatcataaaaatcaaaaagatatttcaaccttaacgttaaatacatatgtaataatacagttagaattacaaataaggtgactgcagtagaatatatgtgtaatgacgatggatgggcatccatgtccatgataaagatggatggacatgaacatacatacatatgtgtaagagtagcatgacgtgacacggggtaggactcaggaggtgagaggaaaatatcattgccacgtattcaatcaatctaggcttctcagagctgctaaagatcttctctttctttctctctcccagttgtgttctcttctctagtttgtttctgcagttttgcctctctctctctctctctcactatctatctatcccaccataaccattaaccaccacctcttaaatatttttccacaaatcaccaaaatttcccatttttttcaccctctgaatcacaatttttttctttctaactaaaatcgcctctacacacaaggattcaggtacatttttttcctgaattttcttaattaataaattgataattaatcaataaaaaatatatatttttaggttttgttgttgctgtttgtgttaatttccgaactggatttgattgtctctttatatggtgaatctgagttgttagatatttgaggggcttgctttttttttttttttttacttattgtaactatatttattatttatttttttaatttgtattagcttttgaatcttagctgacctctttggccttgagagaaattcaatatttctcctacaaattctcattatcactacaaattttcctttgctctgtttggcaggattctgtttcagatttatctgtgttctgatatttcattatttagaaaacaattttgattattttttagcggttttagagagaaaagaagcttaaagataaccaataaatttgaaaagtacatagattgaagctgcataggagggcaactagttgttgtggtaaatatctacaattttctcgagatgcatttggttgacatcttttgaacttgctttctgtcaaaagcaaagcttcttctgatacatgatttggtggatgattaattgttagtgatggattggttactaaggtaaaaaaaaaaaatatctggccatggtgaacagggaatggtgaattatgatattttaattcttgattggtagcatgttttggctggaagttggataactgcttttgattctcagaggcagaaggaaacaataccttgaaagtaaatagatgtcgtcatcttcgtcttcgatggctgcttccagtgaaaggtggattgaccgtcttcagtactcctcattgttctggcctcccccaccagatggtcaacaaagaaaggtgccatttcaatcttgattcctcctcccaatccttttctgtaatgttcttatctcaaaataaactttaacttcagtgcattgaatgtcagttgcattattatttggataataataagaataatgataataataatattgttttgcctaaagtttcaatgtttggagtaaagcttttaaaacttcatcagttaagaaatggaaattctctatggatataataggatctatatgtgatctttctatcctgtgcacttgatgtatatgttaaggggacaaaaatggaaaaattttattgaaaaaggaaagtatttattatactagtaacacaaaaattatttagtgcttgcttttataagtaattgaaagcatttaggagtgtgtttaatgccccttgacctatttggttcttggtgcataggatagaaaaaatcattagccaacatgtttgaggcttgaagatgatgaggtcgagcacatattacatacatatgtttttaaaaagttggaaattttgaagcataaattacatattctgacgtgatacaatcaaaaggacatttttttaggctagttttgttttggaaattgtttcatttgtttttcttgtagtattaccattttgggtgatgggcacctttttctatgctttaaattaatttatgtgtgtatgaatgcagaagtagaggtgcaatattttcattaataattaggatgaaaaactactttatttttcctatgctgattttgaagtttgttaagctcaatatgtggcaccattggctgttgcaatgtccttgtaagagtatataatatataaatttgttgggctacatatttggattctttcatgttgtagaaaatattcatccaaattttttatatcattaaattgattgcatttgaaaaaagtatgggcatggggtgtattcaatctaatgaaattttctggatctttcctgagtattttccaaatttcttttttttcctcttcatatttctgatattttgttgaaaaaattgagtgaaggtatcatagtgttattgtttggactaatgcatgtgcgtgtacataatgttattgtacctttttaattattgattcatttgatccttaattaattattaatttagggtgacattggctatggcaatgatgataaatgaaagaggcagcagattaacaaggttttagagggtctgagtcttgcgcttttggtgcattttgactctgcataagtctgcattttcttctttggtcataaaatgtctgctcaactcatggtgatttttttcaagtatgctcgtccatagcctttgggatggaacctttccatagccacaaattcatatagcaacaaaatgcttagcaactttttacctctccaaaagattagttaaggattttttaacagattgaaaatgaaattgttaaggttgcagtataaaactttcatgtgactttactgaacaacttaagctttacatgatattggaatctttatgaacaactggtctatagtttgatccttgctgctcccattatcctaatgaaaagtttaatttcagcacaatttaggtgggtccatgcattatccaagctttaaacacaaagggcacttgtgtgaggggaatgtattggagatacaatataaaaccattcacgtgcctttacctaagaacttaagttgttgagatagttggttcataactgggatgatatggagggatgcatctttgtactttagccttagcatgaaactagcagctatttgtatttaacacagtctagctgttagatatttgtgattctctggtatttttggtgactgttagatatcttgagaatttggaaaactttcttgtatgtcatttcaaatgttttggggggagtaattattaacggagacaagattctacactggaatccaaagtgtttatggttggacaaaagtgccagaatttttaaggataattttgtttccagttgcattattttatggaattaaatgatctttttgctagctcaactaatctctatttttgagggggtctctttgctgataggctggagagctttgttcactttatgtgcaagtcttttttttttttttgaatttctcttttgaggataccatatcttctattgatgaaaaattctctgaaatgggatgatataatcaattgttttgtaatcttttctcaatgtagtttcagacaagtttcccccataaccatattaagtgggttgttttttcaatattatctcttaaagtttgtatttaatcttacatgtaagaaattggaaactcttcaatcttattgtactggcaagaaagcagcagtcttttggtgatttttttatttttattttatttttaaaacagtctttagtgaatcgtaatgctgtaaataattgcttctcaatctatatgtaaacattttcacgtcttctgctgtatcagaagctcattattgatttattgttccattttgctgttttttctcatattacttatgctttccctaggatcaaattgctgcatatgttgagtacttcattcagtttacatcagaacaatttgctgatgatattgctgaggtatgataaaatgcacccatatttactgacaaatcttgtgaactcgaatagaaatataattatttaacaaattcaattttttttgtattaatttttgcaagagaaggctaagagtttttatcaaatgccactcactgttcaatattattttgacagttgatccgtaaccattatccatccaaggatattcttctctttgatgatgttttgggtatttatgctctatcccatgtcagtttaacttatgattgactcaacataaatatggttaccatgatttatttctattttatttgtaataacttctttatgttttcacatgtaaatctagcgacatttgtccttcatcatccagagcatgggcatgcagttgtgcttccaattatttcatgtattattgatggtacactagtctatgataaggctagtcctccatttgcttctttcatatcttcagtctgcccaaaaattgaggtataattataattccctgcccgatattttgattttattcatatataattcaatttcatagctaaaatgtctcttgctttcttctttcagtttctatactgatttaatatagcaattattcagtttcagtatctacaaaggggttctctattattttcatttcttatgtgtataattttgcagaatgaatactcggaggaatgggctctagcatgtggtgaaattttgcgcattttaactcattacaatcgccctatttacaaaacagaaagacaatctggtgaaaccgaaagaagcactagtggcagtcatgccacaactagtgaacctgggaaatctgggcataattctttgacacagcatgagaagaaacctataaggccgttgtccccctggattactgatattttgttggcttcaccagtaggtattcgaagtgactatttccgatggtgagtatttcttaaaagtaatagataatttagctctatttatttggccagaagtagttaatcatgtatgcatgtatgttttaactttgcttgcaagtcctaagggtgtcgaggttcagtttggttcactttaaggtttgaccccagactcaaccatttttcatggttcataatttcaaaaacaaactaagacatccatcatggtttggttcactttcaaaccatggtttattattgtttcaagtttcgtcagtaccacttgaaataaaaaggaagaactgaatatatttttgtgtgtttctaatacaagctctaatccttttttatagtctaaatggctaatcctattaaaggaaatagggaaattaacataaaaaggaaagtaagacaaatatatatttgcctatcgagataatatcaaagatatttactacactccctctcaagttggtaaatgaatatcaattattcccaacttactagtaagttcatggaatcttgctgtagggagtcccttggtggatacatttgccaattgaagccatgaagggatgtaggctgtggctataagatagttgccaacttttccttgataaagtgcttgtcaatctctatatgcttggttttgtcatgttgtagttgtatgggattgtgggcaatgctaatagccggattatcacaaaacaaccttttagggtcttcatactttatcttgaggtcatcaagaatgaccttcatccataacacttcatagatattatgtgccatagttcgaaactccgcttttgcattagatcgagctactgcattttattttttattcctccatgtcaccagatttcctcccataaacatgtagtactctgaggtggatcttctatcaacaattgaccggcatagtctgcatctatatacacttccatggataatgtacattctcttttgaataacaatccttttcctgtacttgccttcaaatattggaggattttatttaatgccgacaagtgtatcttttggggatcatgcatgaattgacttcctacacttacaacagaagcaatgtttggtctagtttggtataaatagatgagatttcccaccaatctttggtattgagacttctctgttagaaagtcccacatcgcttgtctcaattcttggggtacaacttatatatctgttggacaacttcacttagagtcaattggttttaagttgaaatctaacatggtatcaaagcctatagcccatcttagttcttgcctattctagtaggttcatctaacattctctactgttgatcttttttcctcacttccaatcttgtggttcaatttgaactctagatgtttacaccctaatttgtttgttttttttttttttttaaatatctagtacatgcattctttgggagataaaaataccttgtttggaataggcaacctctatcccaagaaagtgcatgggaaaactgcttcatatcaaactaggttgccaatttttccctcagaacattctttttagtctcattattacatgcaatgaccatgtcatccacatagactaggagtgtgagtttgccatcatgggagtaatgcttaatgaaaaagggtacgatcccgttgacattgtctgtactctagggatatcatatctttggtgaatcttccaaaccatgctcgaggagattgtttgtggccatacagtgtcttcataagcctacacacactttattcttttcattataagaatcaaatcctggtactctcctttattaataacacatataattttgccgataaaaaaaaaaattataagaatcaaatcctagaggaatttccgtatacagttcactttccaggtctccatgaagtaaaacatttttatcattgagttgttgtaggtcccagccaaagtgagcaactagtaaaaggataattctcattgtattcatatttgctattaagggaaacgtctcttcctaatcaatcccatatctctgggccctttgcaactaatctcgtcttataccaatgtagggtgccatcaaatttatatttcagtggctgataaaaaaaaattatatttcagtgtatattcacctgtaaccgtctgccttctaatcttttgacttgtctacaatctataacaggtcaagtaattttttttcttataatgtcgtcatttctttattcatgtcccaaacctagttctcatccgttaaagcttcttgaattaaggtgggagttttgattttgttaaatatatgatatgattagatttattgtaaaaagggaaactgtgaatgtttgttcatacgcgatgcatgcgcccacatgcattgcccttctccgacatgtcagattcatgcgctttcacctaataggtgggcaacaccctcttctaacgaccctcccttgtgctgtttggcttctgttttcatggcttctgatggttccgtttccaattcagcctttgccatgacttttaccaccgttctgctgatctcatgcgagaaactgatcgggacagcaaactacagtacttgggttgccctgtctaactgtgggtccatgtttggtagattcaattgccttcctttcaccaggccagacatcacctttgcagtaagtgtggtaagtcaattccttaatgccccttgtaatagccattgggatgctatcatgcacattcttagatacatcaagaatgcaccaggttgtggactcctatatgaagatgaaggcaatgccaagattgttggttactgtcttgttgattggacaggatcaccatcagacaggaggtctacctctggttattttgtacttcttggggggaagttgatctcatggagaagcaaaatacagttttgctaaatccagcaccaaagctgaatattgtgccatgacaacatctgcatgtgaaatcacatttatatgtgcgttatcttgtagttattagttgatagaaatcagtgattgtatttcctaataatcaacaattgattaactgtgtaatcaattactgattcttggttgagatttcacgactatcgtgtctcaccggggactcactgtcctcggtgggccctccgctcgctgtctctttcaagtgacctgtttaaggttttctggtgactgtcggcggctgctgctggtgctccaacgacctttctggccaaacaacccacgtatctgaaccaccttctgccgatctaccccgcgccattgacagcgtcttgaaagaaccaccgacacactctcatgcacttccttttgctgtgccaaacagcagtcaaacaacccctgttcccagcgcatagcagggaatccggccatcgttttcagtgccaggcttgccagattgaggtgcacaaagcctagtcctcttcgggatgttttgtaattgttgcctcgacctttcctttttttctttccacctctggacatgttgttcttcacgggtgcacagtacttgccaccactattgtgaactccagcctctgctgcttttcttattattcacgggtgaacaatacccattgccacgacgggccttcgctggctgctgccgagccatgtttatccagtgcaaccacatgattggaaccatcttctgtttctattgggtttaccatatttgtaacaagcttggttcatgtcacatatatgctccagcttgagggggagtgttagattacatttcatttgtacgttatcttgtacacatgatcgaaatcagtgattgtattccctaataatcagtaattaatcgatcatgtaatcattactgattctgtttctctattataaataaggatcaggtgtggtaatctaagacacaattacactaaacacttttataatccacaacacctcataaattttttgagccattgctcaaaactctttgtttgcactcaaccttgtaatctcatttagctttttactccttcaagcaatcaagtttccacccaagaacacgcgatatcttgaggcagatcttctatcaacaatcaaccactatataagtctgcatatacttccttggataacttttcgctcatattgaagagaaattctcttcctggacttgccttcaaatactaaataatctaatttgtagatgtctttcacatagaccgtgcatgaacagttgcctgatcataattattgcaaaaacaatatctggtctagtgtgggctagataaataagttttccctatcagtctttgatatcaagcctatttgagctctcccattcctatccaatgattttgcttgatgagctctccatatgttttacgacccaatttgcttgtctctctaagaagatcaatggcatattttctttgagagataaagatgccttttttggagcaggcaacttctattttcaggatttttttcagctttcctagttgcttcatttcaaattgagttgtcaacctttcccttaggatttgttttcaacttcatcatttcctgcaacaaacatatcatctacttagaccaaaaggattgccaatttacctgtctgaaaatgctttatagagtgtggtcaccttgactctacttataccccaaagagagcatagcttgggtaaacatcccaaaccaagcatgcaaagactatttaagcccatatttcctccataatccattagtgaagtcatacattggtggaatctccatatacacctcctataggtctccatgtagaaatgcattttttacttcaaactgttgtaagtctcatccaagtgagctaccaatgagagaataatccttcctgatattcatctttgctaccagagcaaaggtcttctcatagtttgttttgtacatccatctgtatcattgtccttttgtcactcagtttatcaactatctcccaagtcttatttctctccattgctttcatctcttcattcatggttcagacccaattttcatcctcaaggcatcttggactgttttggaaattctgatagaatcaatagctgaaacagaactctaaagttgtgcagaaatatgttcaatacacaacaatttgagatataggatactaagcctggcgaacactgtaatgccaatgccaccacccacaccgctcgtttgtagttgaggaacatggcggaaggttctgacactaattgaccagaaccttttggagaatcacaccacaaaaattagctgttgtagttggagagcccaaggccttataaacctcacactagaatcccatactttcaatgtaggactccaagtctcataacttgcaattggatcctaacaatgtccttatatatcactacaagcacacacaatgcagccatgactcaccaatataattggttacccaataacttactacttcagctgagtcgataactggtccgggttttataacactgctttagtttatataattcagttggaatatgtgtagtttaaactttaaacacatggatttcatatgtctctcgtttctctcatctgtcaatagttacataccactcttaagtctaaaaagatcaagtaggtgccagttgagctacaagcttgttggcagcttttcctgattgtttaatgaaatatatggattgaactaaataatcatctttcaaaacagtgttataggaagcatctgaattcatgttcattagggttacctttgttggtataccacataactaagttcaggaatacataatttcatatttttctcagtagtgtaaattagaacaactagtatggtttatagtctctcttcctttatcttgattaaagaaacagcttacttgattttactctcccgtttatcatagtataatgttttaaattatcttgttatgccttgagcgctgagtatatttttgcttaagtcgatgatttgctgtatgttaacaggtgcagtggtattatggggaaatatgctgcaggagaactcaagcctccatcaaccggtacattaaattatgataacttaatacagaacgctgctctttatttttttaaattgatgtttgaccacaatattttgttaacagttatatcaaaatatttgggacatttcttcagaaagtagagagttttgttaagttgtatgttcacatgagcttgagtttatgtttacaccatatgttacttaacacaagttttctgtgacataacatcctcaatgcactgggaggagactaggaattaattttgttctttttcattgaacagctatattcatcaatgaattttattaaacaagaatatcattttttactatcatattgacactaatgtttatgttcgaaatatgataaggaaatgacttttttttttttttttttaccttagcttcttcccgtggttctgggaagcatcctcaacttgtgccttcaactccaagatgggctgttgccaatggtgctggtgttatattaagtgtttgtgatgatgaagttgctcgcaatgagactgctactttaacagcagctgctgtccctgcgcttttgcttcctcctccaacgacagctctggatgagcatcttgttgctggattaccagctctggaaccatatgctcgtttatttcataggttattttgaacttaataccttatcttgttttttagttgttcatagagttcatctgcctgagaaaatatatatacacctaacctttgcagatattatgcaattgctactccaagtgctacacaaagacttcttcttggacttctagaagcacccccatcatgggctccagatgcacttgacgctgctgtgcagcttgtggagcttcttcgagctgctgaagattatgcatctggcataagggtaagcataatgtgcctttcctgccttttcattattatggttttcatatgaataaaaattgatagattcactttaacgtcttcaataaaaaaatgaaaagtgaatatatatatatatatatatattataaagttctcgtaacgtttatctttcgttcggtgaaaaaaacgtatatctttcatattcatattttcatatgtaactgcaacatattattaaaataagtaaaaaaataattttaaaaatttgtttcacaagttaaaaatggccgataaaaagttataatttttttacaaatacaaaaaaactacgtaaattttcttctaaaagccatcctgaaaatgaatatttcagtcttttgccaaaagttgctaagattttcttaaaaatattttgactcataaatttttcatctttgtattaaaagataaaaaatataaactaatttgtttttttattcaattatgaatttcgtaaaaattaattctattggtgtagaattttaaaatttgactactctaaagtaaattaataatcaactttagaaggtaaagtaaataattccagtcattaataaaaagattaattgttgatattacatgcacatgcataaaaaatatatattaatgcatcaaaatattatttgtcgattttcttatcaacaactaaaaatactcattttattattgctaattttagaggagtcaaaaattgaagactttatttttaattgttcaccgatagcaaaattgcagattactatgaatttttaaggagaaggaatagttagttaatatagttagactactaatgagttagttagttagttagttagttagaggggtttattagatataaatagaggaaaaatgataggagagaggggaatcttatcatttgtagattagctctttgtgaaaggagaaatcctttgtgaagggaaaacccttggaggagagttttctctcctattttctgttcttttcttactagttaataaattcatttattttcttcctcattgcaattcttggttcctaacaaaattggtccgacctgccggatcttcgaggggaagctagtgatagagatggaggaagcgcaaatttggactaagaaggtgaaactgccagcattcatggggacaaacccaattggttggattgctagggctggaaaattctgaggtacaagaaattccttcattccataagctgcaatatgcattcatgagcatggagggtgctgcgacacattggttctacatttggagccaaaacaacccagattcaaattgggagtcattttccacagctttgatcaaaagattcagagatcaccatggtaaccacatctttgaaagattgagtatcttgaagcaagaaaagccaactgagacaaaaacccatatcaaaaaatgggagacttccacagagttcttggaagggaggatcaacatttcagagcggaaacacatgttgtgcaagatattgaatgaagaagttgattcccatgcctcccaacaagacaaaaatagcatggagggaagtgggtcagaattcagtgaagcaaaggctagttcttgggcaagaaaggtggaactacccagctttgatagaagcatagaagggggaactgatttgaagggggtagcagttttgagtgtgacaatgacccattgcagttcttgaaatcagaaaacagaagtaaagaaggttcagtaatcaagaaccacaccctttgtggtggagaagaaacaaaaaatgatgaagcaaagttagcaagagaaaaaaagattgaaaaggttatggaggaagaagttgatccatcgataaagagggagaagcacaagaaaagcggagtgacgaatgtgggctgcaaagacgattttcttgataacccaattacagatttgatcaagaaggaagtcgaagctggtgattcaaccaagccacattgttttcaagattcagatttccataaaaagattgttatggtgaaacaaaaatcattcatgaaggtggttggaacaacaatggtgctggaatcttggaatgtcaacttgttgggtgagcctttagcattaaattttgttgcatctatggctgacagcttagccatggagttaaggcaaaaggaatgtaatgagccagtcaagctgattaaagttatatggagtcgacccttgtccctcccaccactgaagctactagacctcagtttgcatgcaggggtagtgggttgttcctaattgagctacaaggggtgcagttgtcttccagcaatcagacaaaactttaggaagtttcagtgtgaaattccagttttcagattccaaccttgaggacaagattgatttttaggaggggtgtattgttaggatatatggagaaggaagagttagttaatatagttagactactagtgagttagttagttagttagagggacttattagatataaatagaggaagaaggataggagagagggggatcttatcatttgtagattgagcattagctctttgtgaaggaaaaatccttggaggagagttttctctcctattttctgttcttttcttactagtcaataaaatcttttattttcttgctcatttcaattcttggttcctaacaatttctctgttatgaaattaaattagacatcgtcaattagtgaaaaatgttgtggaaatcattcaaaacccaaatttatattcaagagttaacattgtgcttgactcaggttgtgcattcgttcatttacattgttgaatatttggttttcctctagattttctttcacctttttatttcttaatagttgatgaatctactagttttcctgaatttttcactttgaattaagaaaatgttagtgaaaatattttaaaaataatgtttggctaaacagatttttataacctcatgaattataatgggaagtcttatgtataaaactcaagattatttgttttggttttgttttatatacttataataatatttagatgtaacagtatgagcaactgtgactaaagttgaggcttgtgatgcctttgtattgtatgaactccttgtaccccacataagataattgagacactgttttggtagaatgaagataattgatctctaatttacaggccaaaagctatagagctccatgtagcttgtgcaacaagctagacacttagtacataattaactaacttctaacagaaataacagctgctgcggaggctaactaaaatgtctagctgacacttgatatactgtgctaactttttggacactagctgactaatcagaaaagtgttagaggctaaaaatagaaaagtacggtagtgatggtcctattaaatatatgagaaggattacaaaactacaaaagttttcccctagtaatcccagagctcaactccttcagagagtgcaaagcacctctacgctgtgtacagccaaaagagagataacagaatgctcgacctgccttcctaccttgccactacctacctatattctcctcccaacgtgataggttctctctccccataaccaactatgagtctaggatagattcccttcctgccctgtctagaatatacttgccaaaacttatgcccatgatcgggctgaacctgtccatgctcagccatatcaactgggtccttagctttcatgactctaacaaaaagcactagactttgtacctcttaggagttataccacttttataaccacttgagaacatttgagggaattctattttgcaacttcagaacaagtgcaacataaaataacaattatgtatgtgtatttcagtgggattactagctactggacgacatactattgtgcattttggtatttcatctgaagaaactttgtgaaagatttaaaaccatacaataactgactgatgtgtttgaaagatttaaaaccatacaataactgactgatgtgtttttcttttttgttatatgttattgcagcttcctagaaattggatgcatttgcatttcttgcgtgcaatagggactgcaatgtccatgagagctggtatagccgctgatgctgcagctgctcttctttttcgtatactttcccagcctgcattgctttttcctcctcttagacaagttgacggagttgaagttcaacatgaacctttgggtggttatatttcttcctataaaaagcaggttgtgttcacctttatcagttaacatttttattttctttatgttattcttaatttgtacagtcactcatgtagattctttccgtacacttgagatctaaaacatttgttgttgatcagatagaagttcctgcagctgaagcctctattgaagctactgcccaaggcattgcatcaatgctttgtgcccatggtccagaggttgaatggagaatttgcaccatttgggaagctgcttatggcctgattcctacaagttcctcagctgttgatcttccggaaattatagttgcaaccccactacagcctcccgtgctgtcatggaatttgtacatacccctattgaaggtcctggaatatcttcctcgtggaagcccatcagaggcatgtcttatgaaaatatttgctgctacagtggaagctattcttcagaggacatttccacctgagtccactagagaacaaaacagaaaatcaaaatacctagctggcataggctttggctctgcctcaaaaaacctggccgtggcagaacttcgtacaatggttcattcactcttcttagaatcatgtgcatctgtagagcttgcttcacgcctactttttgttgtcttaactgtctgcgtcagtcatgaagctcaattcagtggaagcaagaggccaagaggtgaagataactattcatctgaggatatcattgaggacttacaaacatctgaaaaccagaaagaatcaaaaaataggaaattgaagaagcaaggtcctgttgcagcatttgattcttatgttctggctgccgtttgtgcccttgcctgtgagcttcagttgttccctttgatttcacgggggaataatcatttagcttccaataaggtgcaagatatagccaagcctgttagactaaatggatcctcccatgagttgcggaatggcttagattcagcagtacgtcatactcacagaattttagcaattttagaggcactattttcattgaagccatcttctgttggaaccccttggagttacagctcaaatgagatagttgcagctgctatggttgctgcccatgtttctgaactatttagaaggtcaaaagcttgcatgcatgctctgtctgttctgattcgttgcaaatgggacaatgaaattcactccagggcatcatcattgtataatctcatagatattcacagcaaagctgttgcatctatagtgaacaaggcagagccattagaagcaaccttaattcatgcacctattcggaaggattcccttgtttgtgttggtgttaaaaggcagaatcagtgtgaaagtagtagctgttttgatgctgggcggacatctgttgtaccttcagaagattcattcccatcaaaacttgaccataattctaacaaaaccccatgtccaaagggtgcatcagattataccttgggtaaaggtgtcacaggtttctcattggatgcgtctgatctagccaacttcctcacaatggacaggcatataggattgaattgcaatggacaaatttttctaagatccacgctagcagagaaacaagaattatgtttttctgtagtttcactgctatggcacaagctgattgcatctcctgaaacacaaccttgtgcagaaagcacttctgcccaacagggctggagacaggtacaagcacaaatgttatattgcagcaactttatcatcttttttttttcaatggttgaatatatatgtttttaacctataatgcaacttaagaaaattcccttgtgatacagcttagttcttgttaatcatagaagttaggttctgaaaagcaagaactgcagatgaggataaataggtgtatcctgcgtgcacaagaaacataggaaagacagccaaaattctgaaactgcatcatatgaataaaattgtatggtctgaaattttaaaaagcagagaaagcaacatcccttactatgagcattaaaaattatttattttgaaaataactaaatagctgctctcatcaaaggcagattattataaaatctacattaaactgaagaagcatcatgccaagacaagatatattgggtgtacttgtaacttacgaatgtaaaatgaaataatgataggtattgaagaattcatattttagttggtttgtttaattggtaaagattgactaagagttaccctattgagacacataataagatatagttacacaatgtgattgtgtggatccaaatatctcttttatgtccctatttcaagtgaaaaggttaattactgtctattttggatttaatgttatgtaggttgttgatgcattatgcaacgttgtatcagcctcaccaacaaaagcagctacagcagttgtacttcaggtccaaaattcgtcttatcatgaatggtttcataaaattacattcggaactaacattgaactcctattctgtttagcaaggatactttccttcttttacccaaaaaaatatatcatttcttaaacagacttccaaaatttatgaattatcatttttaatacctctgagaattggcttttactgtctagaaagttcaatagccgatgctgaaaatctcatctatccaatgtttatctgttgtatatttttttattaaatattattatttcccacatttcacatgtttagtcactttcctgggcttgtttacttgtcaggcggagcgggaattgcagccctggattgccaaggatgatgattcaggtcagaagatgtggagaatcaatcagcggattgtaaaattgattgtggaacttatgaggaatcatgagactgcagaatcattggtaattgtggcaagttcatcagatttactactgcgagccacagatgggatgctggttgatggagaagcttgcactttaccacagctggaggtagtatatttcaacaagtgtattgttatattgtgtgtgatttctatgttccgtattatatttaattagtttatcaattggtgttcaataatctctgcgtgtgtggttaatcatgtcttttctgagtccactcacgtttcacatatttcggaaacctaaaatgaggtcctagatgaggtatattgtgatcatgatcattgtgaggtagaaggtttaatagatgtaactatgctggtcctgtagaacagagaggaccttgggattgtaaacttgtcatggaaacctggtttcttggaagagtaagaagcaaaatgtagtggcatagtcaagtgtagaattagattatcatgctatggctaagaatacttgcgaacttgtgtgggcatcacttgttggaatcaacttcagaagtactaagcatacacaagttagagtgatagcctggctgttcatattgtgtttagttctatttttaatgagctgattaaacacaatgaagaagattgtcactgagaaacttcagcattggctcatttctacaagttatgcaaggaatgaggtgtaaaagctaaataatattaaatgttgttaaaggaggatagattacattgtagcaagctgcacgtgattaagaccttaaatctacttaagaggcggagtgttaagacataatcaatgttttaaatgttttaaaagcaagacccatcaataaaaaattgaagacactgagccaaagttcattggctaaaccatagttgaaaccatggtcaaatcaacaatattataattttaatattatatattaagtaataaattaacataaaaatacatgggtaaatttttaaaaaagcataaagggccatgatacaggcccaacaagataaaaaaatcaatagtagaagcttaataatagaacatatgtagacctttatgtgaagacctttattaatctcaaaatataattttgaacaaataaaaaaaaattgaaaagtgaaaagaaaattaaaagaaaaactcttttcaaaattatctttttcccaattttcattgattttagactggtttgaccagtttttcactgatcttttgctctcctgattttttagtttttttgaagtgagttaactgattcactggttttccaatcaaacctgctgatccagtccaattttctattttatggatataacaatgttttactgtgttttgcattaatgtccagggtttgcccattatatagtggtattccaatttatttatttttttgaaaaggcaatacatcatgattttctaatttctaccactaacaaacttgatattttgagcagctttagtgggactgtgaagggaggatttggtgtttcatatattttgttttatagttaagctttactgatattcatgtttcaataatttataatggccagctattggaagcaacagctagagcagttcagccagtgctcgagtttggagaatctggattggctgtggcagatggcctttcaaaccttttaaaggtgaacaaacttccttattggaacttgtaatttatctgggctatggtgaatgaaatatgcaggttaaacattgttaatctaattctagatttcaagacaagtgaatatttgtgagctaaaacaaccttttgatctcatcttattttttagtttcagtttagttccctaaggtgttttggtccttaaagtgtttttattaggccaaatcggtccttctgtcagtttatcacactaacattgttaactttggctgacatgggcaaatgtccatctaatgtggcatctcgtacagtttgccacatattactaagttgactaagttagtatagtaaactaaccgaaggcccaacttggtctaatagagatgctttaggggaccaaagtggaactttttaaatttgtgataccaaaatgaaactaaaaaataaaatggaccaaaagggtattttagcccatgtaagtaaaagggcaatcaagtgcaaaactaaagcaattcatgtgctattttttttcttttgtttctatacttttatacaattattgactgatatgcttgagttgtgaatataccacatgcagtgtcgcctctcagctacaattagatgtctttctcatccaagtgcacatgtccgagctctgagtatatcagttcttcgtgacattttgcatactggttcaatcagatgtagtcctaaacctcggagattaaatggcacccacaacccttcttatcaatacttcaatttggatgccgttgactggcaagctgacatagaaaaatgcttgacttgggaagctcacagccgactttcaaacggattgtctattaactttcttgatatcgctgccaaagagttaggctgtactatttccatgtgaaatgaaatcatccatcttagtctgtgacaattttttgctagacttatagaaaaagaaaaagaaaacagaagttattgatatgcttatggaactaacgggtttgcaaataagcataattctgctagtcctgttaaaaagagctgcaatcataattctagtatgtttatagaaagctcattttgtatcatgcatgtactctagctaaactaagtttcaccttgaacttgcttgtgactctgctctggatagaacagacttgtacagtaacgaaaaacgactgtaaccaggtccttttctccatcattgtctcattttgtgttatgcttatgttgatttagcttgtatggaagtcagttccaattgtttggattaatgtatgttcaggcaggatttccttttttctctcttttaattttgtgagattgttgttggttttcatctttttgctagagatttgtgttttttctttattattttcaaagtgagtaaaatatgtttttttcccttgtttaatcttgatttctgtttttagtccccttaaaaggttactatttttagttccttataaattgtttcgctttgtttttagtctctgacattaattttagttgttaagttatgatgataaagataaattgcatgtgaaatttttttactgttcatatgtggaggttttatgtttaagtttttggtgggttttaagtttaaaccgatgcaaattttctgttagtctaaatgtttatttttgtaacatttatggaggttttaaaaagaatggtgtttggggttttgattttttttcttttttgcaacatttttggcggtatagagtctgcgaaagatttccagcagataaaaattgctagaaacttacagaaaatttctaaacgcaaattttgtctgtcacacaattaatgccgaggattaaaaataaaatgggataatttatgaggaactaaaaatagaaatcaagattaaaggagggatgaaaccatattttacctttttgaagtttatacaaatttattaaggctgtcttggataaaattaattgaaattttagcttaagtctttgataaaaataactgttgaaatagttaaaaaatatagaatgataataaaataataaaataatgttttattttaaaaagataataaggaaaataaataaatatataaatgataaaagtaaaagaaaatatataaaacaaaattaaaagttaatatcataaaaaatgttactttgagtaacgcacgttaaaaactaatgagaagttattaaaataattaatttaatgaacaatgaactttttagtaagtaaaaaaaatttaaaattagctaaaatatcttgtgttgttaaatataacctaaagtgaatattgtagtgcatttaaaaaattaaaaaagaagg

SEQ ID NO: 346 - DNA, 4890 bp, Glycine max
ctatgggacaaaataaaaatacgccgtgtaattttttatcttaaataaggatatatatttgtgttaaggtgtattagtgttaaggtgtaagtgacctggattgaaaactattttttaacttaattttattaaacttaattgggttagattggattgagtttatctttttttttttgtcagcccaatccaatctaactttaattggattggatttgattaattatcaggttaagtcattaaaaaattgtcaccttaagtcttaaaaaaaattatcaagctaaaaaaataataagatattttatttgacagaaaaagaggaaatattattcatatgataaacaataatcactaatagaattcgataattataaaatataaaattaatttataactccaactacttaagtcaataataatcataaatataacattgtcttacaactcaaaggacttgagtcactaataatcattaatcatcaaaatataaaagtcttaaactacataatatctcacagcaatgtaagtgtgtagcgcttagtgcttactagggttttttaatatatagtaacttgcagaggtcgattggttttagttggatccaaacctcccaaccagtcatctaattcaattataattggtttcattagattaaaatcaaatcaatccaatgatccaatcaaatccaccaaaatctaatttgattggacgggtttacagattggatgtaatctaattatctaatcaactcacaaaaatctaattggactagattgaaggagtttatggattgagtgttatgaattaatttggatcaaaatatatattgtattatccattaaaatgttcacttagcaacttattattgtaatttgacaagattgaaaaattgtggcatgaattattataaattatattgtattttatttgcatgaataaaaaaaattgcattttttttctaaaaaaacacttaatattggactttggttatgaaacgggtcatggggctccgtgaatatatattcaaatagaaccctcctagggttttagttttgggtctctctcattcttcacccgctcagacgcagaggagcagaagcctaagcctcaaacatggttagctcttcgtcttgaaactaattgcattcaacttatcattttgcttttactttttttttccttgttttcgtttttatcattaaatggaaatgaaagggtgaaataaattgaatttatactttagcataccattccttaagcaaaagtttttgtcttcggttctgtcgttaatcgttagaattatggtatgtagtctattgatgtggttgggttgctttctgagttgttctctgcttgaacaattcacttattttgttttttattgatgaaaattgagtccttagctgaagctacatcccctcagttatataattggctttgatgtgttgaaattcttatagcatgacatgttgatttttttttttatgattgtgtttttttttatttttggtgggatgcaccttgacaagttttgtgatgtttttttttttaattattttttgggattttatttccgtcaatgcttgttttattgtcgaactggtgtaaatactatcaggttttaaagaacgattcttgactgtgattgtgcccacaatgtcaaggttgttgggatctcttgtggtcacattagttgtatttgtttgcaattttccacaacacactttaatactgttggaatataagtttaagttgaagtcccgcatcagataggaatgagaagaggaatgaaaaggtggaacactgtataagtgaggataagacccataaacttgagctttaatgttttgaatcaaagtgtggtgtcaagttcacttatgtggttgctcgagactcattggtttaagagacccattggtttaaatctcttcggtgttgacaccccctctgatgctcaacaaataccttgagtactatttacagtttaatactcaactgtggttgaactggtctgtgtgtaaatttaggggttgcgttcggctgttgcgttgtcaatctctagcttttttcggatttaatggtttatatgacctgaccactgacttggttggctaacggttcgattaatggttgaatttgtcagactgtccggttcagtctagtttttaaaacacgggcctacaatgattcattgcttggtgtaattgttaggaatattgagtatcttaagttctgacctcaaattctaatttgtagtttttctcctgtatttcaggcgagagggttaaagaaacacctgaagaggctcaatgctccaaaacattggatgcttgacaagcttggtggtgcctttgtatgtacagtactcacaattgtcgatgatattattttactcaaatttatttgtaattttcatttgaactcatgtactcatttggcctggctctgtaggcacccaagccatcatctggaccccacaagtcccgggagtgtcttcctctgatcctcatcctacgaaacaggctaaagtatgctctaacatatagagaagttattgccatcttgatgcagcgccatgttcttgttgatggcaaggttaggacagacaagacataccctgctggtttcatgggtatgtacattttaaaacttggttgccatatagtgctgttatgtccaaattattgtttatttggatatttggactatattgtcacttttgtatattcatatcaagatttttaaattgggattttgacaattttgaccagatgttgtttctattcccaaaacaaatgaaaatttccgtctactgtatgacacaaaaggtcgattccgtctccactctgtaagggatgaagagtcaaaggtttgtctattcttgcataatctctctaatgtctgttcatacaaatttgtgccacatattggttttgcatgtagtaaattttttgtttcaataatgtattttgcatcaaaatttctcaatggcatattatcactcactgttgaaggtgtgtcgttggatggtcaaatactaaaatttaggactataaattggaaacttgtttggacatatcttagattggtgctacttgatgcttttgagctctataaatttgttttgctggatcttattttaatgtttttctgtagattttctttctagtgattttactctaatttttgccttgttatagtttaagctctgcaaggttcgatctgttcaatttgggcaaaagggtatcccctatttaaacacatacgatgggcgcaccatccgctatcctgacccactaatcaaggccaatgacaccatcaagctggaccttgaaagcaacaagatcactgatttcatcaaatttgatgtggggaatgttgttatggtcactggtggaaggaacagaggccgtgtcggtgtcatcaagaacagagagaaacacaagggaagttttgagaccatccatgtccaggatgcaactggtcacgaatttgcaactcgtatgggtaatgtcttcatcattggcaaagggacaaaaccttgggtgtctcttcccaaaggcaagggtatcaagttgtctatcattgaggaggctagaaagaggcttgctgcacaaaatgaaacagttgcctaaatgattttgctggtaaaatttagctattttatctcttcggctgtctgagcataggatttttggtgaaatgactgagcatagttttgtatcaaactttatattacaattttgagctgttgatttcagtttttattaccttgtgattattaatattttggtgagatattgatctttttaggggggtaaaattacgtccttaatcttttactttagttgcaattttacctcctcagatattaaattcagtatattttctcatttatattcctacctaatatggaattttctttattcatcactccaactttatatcgaacccgaatgaatatttgtataacaggtgtgaattaagttaaaaaattgttgatctatcttaatgctagctttagtttatttgggctttttcattggtctgtattatttatttatatataattacaatcgagaaatgtaaacttaaaacactatttaattaaattatataactacaaagttaaatccaaagatttacaatctattatcttttaaaataaatcatttttattttcgaatatcattatgataaacttgaaaaggagaaattcattagttatagtaattaattatgtaacatgtcaatagcttttttgataactttttttgccccaactctgatgtttgttaactggatatgtccacattacaatacctattaaataataatcattttaattcttaaaattatatcaataaaaattaaaattactggtggttaggaattttaggaactaaaatgtcgtttttataatttcgtaagctaatttagagtattactccattgagtaggttaagattttaatgatgtggcgaaataaaatatcgtgtaattgtgtcagaaattatctaaatatttttatttaagagaataatttgcttctaagcaaatgttacataaattaaaaaaaaaggtctttttatataaattaaaacaaacaaaaaaagtaatttggattatgttgtaaaaatttactctaccattattattatcattatcattaatcaattattattattgtcaccaccaacttatgacatctttattattgtcttcatcacaattatcattatcacaattactaccattatcttcactatcattattgtagctatcttgactatcacttctactagctaaagtcacaattataaaattaacaatcatcattattattgtcatgatcaatactactatcatgtaggcatggcaacggggcggggc

SEQ ID NO: 347 - DNA, 4779 bp, Glycine max; identical to SEQ ID NO: 292

SEQ ID NO: 348 - DNA, 7370 bp, Glycine max
gtaattaggcattttaggaatggagaaagcgattgcgcgtgaacttgttcaacattttgccattggtgtggacgagatttatctctatagacgagtattttttgtgtgtcatattgcgtaaggaatacaaatattatttttgatttattaaataacaaatgttatgctttattatgtgtttcatatttttatattattttgtttcataattaatagtaagggacactcaatatataataccaaatcacctttagtttttgcatagaaaaatatataggaacatcacttcatacaaaaaattcttttatacacacacacactcactctctctctctctataaagttttaatttttataaacatcttcttacgattattgaaacaacagcttaaaataataaaaataaatatattgaaagtttcaatttataaatcagcagtaaaagtttttacaatatggataataaaaattatgataaatatatattttaaaatagagaaaaagaccatgtcctgaaagtataaacttaaaagtttatgaattactataaaattattttaaaagttatgaaaaaataaattgatacgtaattgagtcaaaaatgaaaaaatattttatactggtgcattatcagtgaaccctttaccataaatatctaaaaaatataataaaattattttacattggttatgcattatcattaaactattttgcacgattatggattacatatcataattcattttttataaactgtttgtgattagtaagagaagaatttaaaattattcttaagaataattccaattcaatatagaaaagcacacacttgacaatactacaaaagaagtagtaatatctgctcaaaagaaaactagctggttcaattttgcgggacattaattaataaaagacctctctcattatttattattttttgtttacattcattttcattaccaattgataaataaatgaaagtataaaagaatgctagctaggatgaggaaatgaagaagagaagaactgaataatatgagaagacactcacaacattgatttagaaacatttaagaagaagaagtgaaaggtggtgtgtgtggggtgctactcctcctcctcctcctcctaccctttcattttcatttcccacatttctctctctctctctcctatacttcctctttacactccccatctctctcacttttcattttcatctccattttttttctctaaaactccaatttcccattttacccctcactgtcgatccccccttcgccctcgctccgattcctaggttagtctcctgaaacgcaccgttttgaggccttcgccgttgattcgcactctccgacgtgttgaaattaattaatttgctctctctttctctttcgattttaggaacagggttttcagttttcactgttccattaagtttccgagctcaattcagcttccgattcgccgcgcgcaaaacgacttcgtttttggattttggcgtcgcgtcctattcaggtaactatcgtcttgtttctagcgttcgttcttgttctccatttcttgttttttgttcagtggaaaatctcgatctgttgaatttatatattattaaaattaaaatcagaatcataaaaaaggtcataatcaaggttttggattacgatcacaattcatcacatttttttactaatattttatgaaattactgacacgtactgtcacaattgtgttcacagaaagaaacccaatcatttattaaaacctcgagcttaaaaattaataatagtattaaatgcattttttctttaattttgtttttgtctttgctctggttgttaatattgtaacaaatggccagaatcgcagtcccttttttaaaacctttaggattaataaatacctaaactattaaatgcactttctctttgctcaggttattaatattgtaataaatggccagaataaacctcgggattaataaataacaaaagtattaaatgcatttattctttgattttgtttttctatttgcttgggttattaatattgtaatgaatgtgtactgtgctgtggtgaccggatttggggtgttgggttggtgggaacaattaattccgtgttatgtgtgtgtgcttggcctttgtgggttttaagggatgggattttttttgaaatttttcgtgtgaaatgatatcatgtgataattggtactagtactaaccttttttccccctatatatttgattcctgattgggtattatgggtaaacatgattagtttcgtacttaaatggattttgatgggctgtttctttttttgggtctggaaaatttgtgctttcatggtccagaggagagagcatcattaaatactcggagtcagattttgctgaagtagaaactgggtattcatgcctttactgtgatttacttaatataatatggtgcttcagattattttcttttcaatttaagcactgtagtagtatttttttactagcttttaaagtgtcttcataaaagttcatttcttgttttctctattttttttgtttgaatcatttaatatgattctgctctttttatcttgatgtggtttgcagctccttaccctgtacaaaagaaatatctgaaaaatgaaattaagtggctatgaaactgaaagcaaatttaggagttttcttggttttttctttttactagcttttttcacttttgtaaattttaaggctttcctttgtggttgtgaattatttggacagaagctatatactataagatgagatgaatgaagaaagatattgaagatgaggtgcttcccaatgatatgagtggggcacagttgaatgatgagagttatgaaggaagtgctggcattgttctgaagaaggggccatggacatcaactgaagatgatattttggtggattatgtcaagaagcatggggaggggaactggaatgctgttcagaagcacaccgggctgtttcgttgcggaaaaagttgtcggctgcggtgggccaatcacctaaggccaaatttaaagaaaggggcgtttgccgcagaagaggagcggctgattgctgaacttcatgccaaaatgggaaacaaatgggcacgcatggcagctcatgtaagcatattgtatataatttccatttgccatacgtatgtggttataactatagttttttttaaatgttttcttgaaatcattgaattctgtttgctattagtgatgtcactgctgttatgtctttcttgtattgtatcaaggaacttccatctgataaccctattttccttttgacttgtccctaaaaatatggaacttgctagttgtatctcttgatgtcatacaatgacaaacacgcacatagacaaagaaaacagttgattaaatagtcagcgtttggagaggcatctccaaataggtgataacctgacgtagaggtctactataaccaatgtggctgaatacagtttacatgtcttttgttagattcccaatgcataacgtcatgttatttaatgctctaatgtgtatgtatgttacgcaatatagagttttacaatgtctttgtaaattttttctggatatcattgtactggtttagaaagtaaataaaccattgttgtggtatgatactttggagacattcattttaacgcattgttaattttctgtgttggcaaatgatttgttattctctcatatctacaacttcaattgcaaattaggttagtaataatcttacaaagtagataatagaatacaccatggtaactgttcatttgtaagagttagaagcttgcctatgtcacattctattggatgttgtgtacttgtgccccttgaccaggaaatcaattgtctaatattatcttgccaaaacaggtaaatgacaattatatcaataataaagcttattcggttgataatagataagtttgaactttattatatatgctaatcatagtgaactgatgtgtttatctgtcattcttttttgagattgaattaattcaaaagaaactcgtggttttttttttttatattttcttaattcttatacttctaataattgaggggtttaacttattccagcaacaatccataattcatgactaaatatcttagaacttttcagttaaaacattccaagtatggccaccatgtattgcacacaagattttgtaattgtggcaatcagtttcttctacaattatttttttccaacatatcttctttttttccttaatctgttatgatgtttaatttcttttgcttgtagttgcctggtcggacagataatgagataaagaactactggaacacccggatcaaaaggcgtcaacgggctgggttgccactttatcctccagaagtgagtttgcatgctttgcaagagagtcagcatagccaaagcactggtggacttaatggtggcgataaaatgcatcctgatttcttgcagaaaaacagttatgagatacatgatgctatatttgacagtctaaaggataatcagggaatcttaccttatgtgcatgagctttctgatatttctgtttatggcaataagctaaaaggtcttgattcttctcagtattgtagttttgtgccaccaacatcacctaagcgtaagcgtcttaaagagtcaacaataccatttattgattcctgtgctatgaaaaaaaaggatttatatccatttgatcaaattcaagacaataattctgataagattgcacaatcatttggaatgcaagcaccccttgatcctggtctctcctcgcacagttcaatgtgttacagccattcactttcaaatggcaactcctctacttctaagccttatgaggctatgaagttggagctcccttcactccaatatccagaactcgatttaggtagctggggttcatctcctccaccttctttgctcgagtcagttgatgatttccttcagtctcctacagcaattagtacactggagtcagattgttcttctccacaaaatagtggccttctggatgctttactttatcaggcaaagactatgagcagttcaaagaaccattgttctgataagagttcaaattcttctactgcaacccctggtgacagagctgacagctctattttgaatgtgtacgagacagaatgggaagattatgctgaccctgtatctccctttggtgccacttcaatattgaatgagtgcccagctcttagagccaatgcaaattcattgaacggacagctgccagttcagacctttactggttagtaattttctgtgtggtatggataatgattattgaaaacgtgtcgcacttttatacatgttcgcatacttctttggctcaatctgaaatttcttcattattttggagatttcattttatattatgggtccatgaatacttgttaatacttattttatatgatagacttggcacatttctatgaatacatttatcagttttattgaaagtgcatgtgttaggtttactccttaattcctgtgttaattttgtcagttgctaaagatctattgttattccttgtaaagttcctccttaattctttaattcatgtgcaggcaaccttccgaaattagaatctgttgaccaggtttggactcctaacaatgaaaatctaaccttgtccctgttgaatattactcgtccagacttcttgcttgcttcagattggtatgacctaggttctggacattgcaagaaccaaaccatcacaactgatgctgcaacggcctttcttggagatgatttagccactgacctcaagcatatgactgctggaatttctaaaactatgtttgaaaatccattccagcccctctaaatgtacattcagggcaaaagtaacaaaggggttatttctctgaacgtatgttgaagcctctgtaccggaaatccaaacaagcgccaagtcaagtcaggtgtgttgttgtgcaatggcagtgaataaaatgcacgctgtctgtcggctgttcaatcttcattaagaaaacttctatcagatgtgtgatttgaaactctattactaagtagatttgtgctgattttttttaacatgattgtccaatgtcgatatttcgtgggctgaaaaagattttatgtgtgatttgtagtaccaaaaaattggtcagagactaataatttcttgtggctttgtcactttttttttgggtgttgcatgtattgtaccatcatgaatcttgtgtacacaaatgcttttgcagactcctgatttaattgttgaacaacattgcagttgaaacattggactgcatgtatctggattggatggattaagaatgtcttagttttcttatgtttttttgtttgaactgatgatatttttatcatttatatgattattattaggccaaaaaataataatatctgaaaatttcttaagttgcatttctgggttttggagcatgcctaacttgcaaaatgtttaaaatggctacagcataaaaaatttgtcgactttagcctataaacaataatttttcaagttgttcatggttagctggtcccgcatagtagtataacagaacttggttgttacctagccaacaacataattatgcttctcttgtaaaaaaaaaaggccatacctaactttgaaaactaaaaactaaacaatcgataaaatacgatatcgatcgataaaataatggaatatttgcgtctcatattttgcttgtcaagttattttacaatagagtaaaatgtcgtacattctaatgttagggaaggggagggcagattttaacataagtgggaagaacaatgtaatatttgcatctctttctaaagatgtgtcccgtgataatcaaatttaggtccttctcataagtgcgcatgatcattgagatgatatcaaaatatttaataattgaattattcaaatttaaaatatacaagaatttattaaataaagtaactctacaaaaataattaattcccattcattttttttttgtggaaaataagaaaagaaatgttcagagtaaagaagcaaagttcaaattcaatgccatttctattgatacataatttatttaaatgtagaaaacaaaatttatttttatggaatgaaggaacaatacattatttatatctgaaaaaaggagtctctgatcactgtttcattcttactttcatagaatagccgtcctgttatcgaattggagtactctaacaagaccataatggtttaaaatatcccaccttgatcatttggcttcttacccttattctcatcattggacaactcttctaaagaagattcacttggccctgtgaacatgcttgatgtacat

SEQ ID NO: 349 - DNA, 7075 bp, Glycine max; identical to SEQ ID NO: 294

SEQ ID NO: 350 - DNA, 2850 bp, Glycine max
  modified_base (2698)..(2838): a, c, t, g, unknown or other
ttctttaattattagaataatgctacatgtacaactaatttttggatattaatctataattagtattgttatcagccaatcctgattcagaaagaaatttgaggatatatatataatatttttttcttcggaatttttgtatgtatagaattactcaagtgtttgagtgaacatggatgaaccgtactcaaaagtatttagattctatacaagtgtgataaaatcaaatttgaagttctcattgtttctagtgcggtccattgtttgtagcgcatggtccccagtttctattcattctttactcttttttctcaacagtcgtagttagattataatccctatttataagttttttataagccaaagatttattaatagaatccctgtttacaaatagtgtttattaaaattggcggagtaatttatttatttgtaatttttaataaatttgagtcaatttgaaaaaaaaaagtatttagggtgtcactagtaattctctaaaataataaattcaaaactaattaattcaaaaattaaaaacttaaatatattttttatccttaaaatttagattaatttttatttgggtccttcaaacttaatttctttagtcttaatttcgaaaaatacttttttaatcccgtttgattggtttttggttgtttaaatacataatttatgacctgttttagcagataagaaattaaaaataatatttttttaaaattgaaagataaaaaaataaattcaaatttggggacaaaacctgaactcaaattggaggaacaaaactatatttaagctaaaataaaataaaaaaaacacaactcagagagtttcaacactaattcgtctctacaacaaaaataattatataaaaggatgttgagaataagttctatgacattggagattcttatctcattcatacttttgaaaagaaaaatgagaaatgcctttctactggctatgacaaagatgagaaatccatttatatgttgaaagaaaggggaaatgtgccttcacttccatttcacaaatacacaaaaaaaaaaaaaaatgctagtagtgtaaacactcaaaacactcaaattaagccctttcaacctttctttcttatgagtttacaatctcaaagcccatcaaagttcacgaccctattcatctcttccaacatgagcaacccttcagatgaaagggagcagtgtcaaaagaagacgaaatccaccatatgcgaagcctctaactttaggacatcaaggagaagattctgcagcaacaacaaaaatgaagaggagatgaacaataagggagtttcaacaacactgaagctttacgatgatccttggaagatcaagaagacgctaaccgatagcgatttgggaatcctaagtagactcttgctggctgcagatttggtgaagaaacaaattttgcctatgttgggtgcatatcatgcaagagctgcagaaactgaagggaccccagttagagtttgggacatggacaccaaatccatgcaccaactcgttctaaagcgatggtcttcatccaagagctatgttcttattggaaagtggaaccaagatttcgtcagaagaagagatctcaggaaaggtgatgagatcggatttcattgggatccatataattgcgttttcaatttctgtgtccttaaacaagctatgccagagaattaatttaattttaagtgttagctttattattttactttcaaatcattgaggaaaacaatggcctatatattattcctatatgtaacatacaataatgttattgcaatagcgtgtacttcaacctaattatttaataccaagtttctatattaatgttgtatcttatgaaatccttctattttccattctataaattaaacctaggtctagctagcaggagatctatgcacggttgaaaccttaattgataatctatatctaatggatttgtatgatgagggtgtttaattcctacttaaaccatggatatagtagtagactcattgcactagtacttcctggttgaaggcgagggcactgcattcatcattcatataattaatgtaaaattgtgcaacgcgttattcgagagtacttaacataaaatgtataattttgaacctcgtaactggattactaatcatcatgagttgaaaggttgttgtaatacagttttagataggatgtacacgcgcgcggatacatccttcttaatcaaatcaattaacactttagaagttgtaaggaatgacactaattatattgttcaaataggtttttttttttcttttagatgtcatttcatgtgaaataaaaaatgtgatacttggttataaactcattttcaagcagaactgcagcaaaatctctagcttatattgttctattaacatgtttttgttaagtgtaaactatatatctgcatgaaacatacatagagacctaactgtaaaaattaatgggacatcaaggatatgatgagggggctatatgcatcctctaacctaaaggaaacgatgaatttctttaataattattactacttggataagtcaaaaaatttaattaactaagggatagcacaatactcacttatcaggaatgctgaatttcacatgcctatcattgaacattgatcataagttatctatatttacttattggtgaataaagaaatgttnnnnnnnnnnnnnnnnnnnnnnnnnnnnnnnnnnnnnnnnnnnnnnnnnnnnnnnnnnnnnnnnnnnnnnnnnnnnnnnnnnnnnnnnnnnnnnnnnnnnnnnnnnnnnnnnnnnnnnnnnnnnnnnnnnnnnnnnnnnnntgaatggatact

SEQ ID NO: 351 - DNA, 2834 bp, Glycine max
ccctgtaatctttcttcttattaatgaagtaaaaaaaatatcttaacgataatattgaaacaggtattttgttttaaataatctttttcacctgctcactgatgcgcacctctgtttatccctagcctcaagtaaaattgttgtttttacaagtatgttatcatttttcccgtcaccgggatattcactatttttattctcctttttcgctttgtggttacgtttcacagggatatcaagttcacccacatatatatcatgcttaaagttctcatgcttgaaaatgctggtgataactcaaataattgtagttgtagttaatgatgatggatttgtgtctatgatagatttggaataaaaatattagggagtaattttttgaggtttctaacagcgagaaaaataaatcactaaaatcaattttcatgtcatcatttaaccaaaaaatttaacaggaatcaagaatcaaatgaaaaaataatttagaaatcaagactaatcaacatttagttgaaagattaaaaataaaaactttaaataattgggactaaaaatatgttattctaaaaaaataaaaacttaaatatgtttttattttcttaaatttatgttatttgttattttggtccttcaaatttaaatttatttttttggtgtcaatttaaaaaaaaaaaaaaatagtcccttgtgataattgagtttttgcggttaattgtataatttataaccttttttttagcacatatgggactaacaataatattttttaaaattaaaaactaaaaaaatcaaatttaaattttggagacaaaatcaaaagtgaactcaatttgagtaacaaaagccaaaaataaaaaacacagctaagaaaatttcaacatttcgtttctacaacaaaacataattacataaaaggatattgacaataagttgtatgacattggagattcttatctcattcatacttttgaaaagaaaaatgagaaatgcctttccactggctatgacaaagatgagaaatccatttatatgttgaaagaaaggggaaatgagtcttcacttccatttcacaaatacacaaaaatgctagtagtgcaaacactcaaagcccgatcatcatttctttcttatgagtttacaatcacaaatcccatcaaagtttaaaataatattcatctcttccaacatgagcaatccttcagatgagaaggagcagtgtcaaaagaagaggaaatccaccatatgtgaagcctccaactttaagacatcaaggagaagattcttcagcaacaaaaatgaagaggatatgaacaagggagtttcaacaacactgaagctttacgatgacccttggaagatcaagaagacgctaaccgatagcgatttgggaatcctaagtagactctcgctggctgcagatttggtgaagaagcaaattttgcctatgttgggtgcagatcatgcaagagctgcagaaactgaagaagggaccccagttagagtttgggacatggacaccaaatccatgcaccagctcgttctaaagcgatggtcttcatccaagagctatgttcttattggaaagtggaaccaagatttcgtgagaagaagagatctcaagaaaggggatgagatcggatttcattgggatccgtataattgcgttttcaatttctgtgtccttaaacgagctatgccagagaattaatctgtgttagctttattctactttcaaatcattgaggaaagcaatggccaatatattatgcctatatgtaacatacaataatgttattgcaatagcatgtacttcaaactaattatttaataccaagtttccatattgtggtatcttatgaaatcctcctattttcgtgttttcgtttttcccatgtcattgtttatttcgtttctataaattaaacctatataggtctagcatgagatctatgcacggttcaaaccttaattgttaatctatatctagtggatttgtttgatgaggttgttttaattcctacttctgttattatatataattgtaccatggatatagtagtagactgattattgcactacttcctggttgaaggcgagggcactgcattcatcattcatataattgatgtaaaattatgcaaccctttattcgagtacttaccataaaatgtataatctttgaaactcataactggattactagtcatcatgagttgataggtttttgtaatacagttttagatcggatgtacacgcgcacaaatacatccttcttaattaaatcaaaattaacactttagatgttgtaagggatgacactaattatattgttcagatagggtttctttttttctcttagatgtcatttcatgtgaaataacaaatgtgatccttggttataaactcattttcaagtataatttcagcaaagtttctagcttatatagttctactaacatgtttttgagtgtaaactatctacatgaaacatgcattgagacctagctttgaaaattaatgggacatcaaggatatgatgaggggctatatgcatctctaacctaaaggcaatgatgaatttctttaattattattaattattacttggataagtaaaaaaattaattaagggataaaacaagatatactacacttagctggaatattgaatttcatatgcttatcattgaacattgatcataaattatctatatttactattgttgaataaattaaaggaatgttattttggataccaagtttggatttctttataataacaatttattttctccattatcattgaatcctcccaaagttcaagattttactca

SEQ ID NO: 352 - DNA, 2828 bp, Glycine max
tttctttatgcaagggattgctccctgtaatctttctttttattaatgaagtaaaaaaatatcttaacgataatattgaaacaggtattttttttttaaataaccttttacacctgcttactgatgcgcacctctgtttatccctagcctcaagtaaaattgttgtttttacaagtatgttttcatttttccccgtcaccgggatattcactatttttattctcctttttcgttttgtggttacgtttcaccgggatatcaagttcacccacatatcatgctataaagttatcatgcttgaaaatgatgatggatttttgtctatgaaagatttgggataaaaatattagggagcaattttttaggtttttagccgttagaaaaataacccgttaaaatcaactttcatgtcatcatttaacgaaaaaaaatttaacaatgaaaataaaaaatcaaacaaaaaaatagtttagaaatcaaaactaatcagtatttagttaaaagactaaaaacaaaaaccttaaataattgagggaataaaaacatatgttatcctaaaaaaattaaaaacttttgtttcctcaaatttatgttatttattattttggtagttcaaatttaaatttatatttttggtgtcaatttttaaaaaaatttagtccctcgtgataattgagttttcccggttaaatgtataatttataactttttttagcacatatgggactaacaataatattttttagaattaaaaactaaaaaaaataaaatttaaattttggagacaaaaacaaaagtgacgtcaatttgagtaacaaaagccaaaaataaaaaacacagctaagaaaatttcaacatttcgtttctacaacaaaatataattacataaaaagatattgacaataagttgtatgacatcggagattcttatctcattcatacttttgaaaagaaaaatgagaaatgcctttctactggctatgacaaagatgagaaatccatttatatgttgaaagaaaggggaaatgagccttcacttccatttcacaaatacacaaaaatgctagtagtgtaaacactcaaagtcctttcatcctttctttcttatgagtttacaatcacaaatcccatcaaagtttaaaataatattcatctcttccaacatgagcaatcattcagatgagaaggagcagtgtcaaaagaagaggaaatccaccatatgtgaagcctccaactttaggacatcaaggagaagattctgcagcaacaaaaatgaagaggagatgaacaagggagtttcaacaacactgaagctttatgatgacccttggaagatcaagaagacgctaaccgatagcgatttgggaatcctaagtagactctcgctggctacagatttggtgaagaagcaaattttgcctatgttgggtgcagatcatgcaagagctgcagaaactgaagaagggaccccagttagagtttgggacatggacaccaaatccatgcaccagctcgttctaaagcgatggtcttcttccaagagctatgttcttattgcaaagtggaaccaagatttcgtgagaagaagagacctcaagaaaggggatgagatcggatttcattgggatccatataattgcgttttcaatttctgtgtccttaaacgagctatgccagagaattaatctaagtgttagctttattttactttcaaatcattgaggaaaacaatggccaatatattatgcctatatgtaacatacaataatgttattgcaatagcatgtacttcaaactaattatttaataccaagtttctatattgtggtatcttatgaaatcctcctattttcgtgttttcgtttttcccttgtcattgtttatttcctttctataaattaaacctatataggtctagcatgagatctatgcacggttgaaaccttaattgttaatctatatctaatggatttgtttgatgaggttgttttaattcctatttctgttattatatataattgaaccatggatatagtagtagactgattattgcactactttctggttgaaggcgagggcactgcattcatcattcatataattgatgtaaaattatgcaaccctttattcgagtacttaccataaaatgtataatctttgaaactcaactggattactagtcatcatgagttgaaaggtttttgtaatacagttttagatcggatgtacacgcgcacacatacatccttcttaattaattaaatcaaaattaacactttagatgttgtaagggatggcactaattatattgttcagatagggttttttttctcttagatgtcatttcatgtgaaataacaaatgtgatccttggttataaactcattttcaagtataattgcagcaaagtttctagcttatatagttctactaacatgtttttgagtgtaaactatctacatgaaacatgcattgagacctaactttgaaaattaatgggacatcaaggatatgatgaggggctctatgcatctctaacctaaaggcaatgatgaatttctttaattattattattatttggataagtaaaaaaattaattaactaagggatacaacaagatatactacacttagctggaatattgaatttcatatgcttatcattgaacattgatcataaattatctatatttactattgttgaataaattaaaggaatgttattttggataccaagtttggatttctttataataataatttattttctccattatcattgaatcctcccaaagttaaagattttactcagttaattagttctatc

SEQ ID NO: 353 - DNA, 4843 bp, Glycine max
ttttgttccatgatctaaatggaagacggtagaaagttgttatctaactcttctttcaaattgcttagttttaccaggagaacgggttaacaatgttgcacagagtatgacaacttcagttttttctcatttggataattgctggattgaggaggttccttattagttgaaccaaatcatagcaaatgatgtagctgctgctctatctttctttccatcaataaaatccagcatttacgcctttaaaaaaggcatcatcacttaattgcattatttcaaaaataaaaataattaatgttattcaaattaaaaacattagttataatacataattagttcatacaacaattaagattataaattttttttttagaaacatagcaactaatggtacatattttttaattaagaaaaagtacaaataatactaagtataaatttaaaaatttgtaattaaataaattcgtgtatcacataagtataaaatctagttaagacttgttataggccatatatataagaaacaaataataatatttttttttactaattataaataacatataacatatgagtaaattattgttaaatttcattttttttacctctaatgatattttttttcttataaaaatagttgcatttgtcaaactatttaaaaaaaactaagataagtatactcattgattgaaaatatgcattaaaattgaaaatacaaaacaagtttaagttgaaagttgaaaacaatactagtagacaagcaaatgaacaaatttgattggcgcatgccaaaatggacagtttactatttaagattgagaaggaagaaagggtggtgcctttgcaaatggccaaggcaagcgctgggctttgaaatggagcatttcagaatcatcaatgatgtaacccgcaacccactcaagttgtgacacgtgtataagcattctatctcgttcctctatatataggacctccttcacccaacacaagtgtgtgtagtataggattctcttctttattccttttgtaatttcattcattcttaatctttgtgaaaaataatgttcatcgagaattttaaggttgagtgtcctaatgtgaagtacaccgagactgagattcagtccgtgtacaactacgaaaccaccgaacttgttcacgagaacaggaatggcacctatcagtggattgtcaaacccaaatctgtcaaatacgaatttaaaaccaacatccatgttcctaaattagggttaggtctcacatcaacctcctttttttttaattaattttttgttttcgttttgctgatttgtttaattggttgcttgattctcagggtaatgcttgtgggttggggtggaaacaacggctcaaccctcaccggtggtgttattgctaaccgagagttagtttcgatttcttagcctctgtcttttggtattaagagaaaccttgtgttatttatgctaacatttttgtgttttattatcctcaggggcatttcatgggctacaaaggacaagattcaacaagccaattactttggctccctcacccaagcctcagctatccgagttgggtccttccagggagaggaaatctatgccccattcaagagcctgcttccaatggtatatcatcattattgcagcaatttatcatttttttttatcagatttattagtgttgattgaattttttgatacatgcccacttgttgtagttaaggtaataaacttagcttatattcttgaaataaatctgttggcaggttaaccctgacgacattgtgtttgggggatgggatatcagcaacatgaacctggctgatgccatggccagggcaaaggtgtttgacatcgatttgcagaagcagttgaggccttacatggaatccatgcttccactccccggaatctatgacccggatttcattgctgccaaccaagaggagcgtgccaacaacgtcatcaagggcacaaagcaagagcaagttcaacaaatcatcaaagacatcaagtatgccctacttcaataataatctacaaaatcatcatgatatgtgtgatcagtatgtatttttttttcagcttctaactgttgacatgattatgaactcagggcgtttaaggaagccaccaaagtggacaaggtggttgtactgtggactgccaacacagagaggtacagtaatttggttgtgggccttaatgacaccatggagaatctcttggctgctgtggacagaaatgaggctgagatttctccttccaccttgtatgccattgcttgtgttatggaaaatgttcctttcattaatggaagccctcagaacacttttgtaccaggttggatgcttgcctttatgttccctccacaactttaaattgtttgtatttatgctaattcatttattaacttggcttgtgttgtcaacagggctgattgatcttgccatcgcgaggaacactttgattggtggagatgacttcaagagtggtcagaccaaaatgaaatctgtgttggttgatttccttgtgggggctggtatcaaggtacattgattttatactaatgtcatatcattggtgttatttttactagcactatctatcctttgcatgctttgtttaaaatttatgcattgtgctaattttatatggcaaaaatggagaaacgagttgattttttcaaatgttctgttgatgattggcagccaacatctatagtcagttacaaccatctgggaaacaatgatggtatgaatctttcggctccacaaactttccgttccaaggaaatctccaagagcaacgttgttgatgatatggtcaacagcaatgccatcctctatgagcctggtgaacatccagaccatgttgttgttattaaggtaaattttgtttcacccatttttctgtttctttctcttgtcagggctttgattattctatctgctttgttgcctttgcagtatgtgccttacgtaggggacagcaagagagccatggatgagtacacttcagagatattcatgggtggaaagagcaccattgttttgcacaacacatgcgaggattccctcttagctgctcctattatcttggacttggtccttcttgctgagctcagcactagaatcgagtttaaagctgaaaatgaggtctgtatgcattgctaaataatttcattgcttgattgtattagtcattgtatttttttcagccttctgaggtcactatgttgtggtgattgctgcagggaaaattccactcattccacccagttgctaccatcctcagctacctcaccaaggctcctctggtgagtttaatctaatcttattcaatgatgattgatgagtacatatccttatttctatataggaattaagttgaaagaaacatatcctctgaattttagtatcgagataaaattgttccaattgtgaagttaaatcattgttgttcagtgaatttcccttttttgtccttatgatttttttttatcaaaagttggcaaggttactcacaacagtactctcacaggttccaccgggtacaccagtggtgaatgcattgtcaaagcagcgtgcaatgctggaaaacataatgagggcttgtgttggattggccccagagaataacatgattctcgagtacaagtgaagcatgggaccgaagaataatatagttggggtagcctagctgaatgttttatgttaataatatgtttgcttataattttgcaagtgtaattgaatgcatcagcttcattaatgctttagagcggggcatattctgtttactaggaacatgaatgaatgtagtataattttgtgtactttatcctcctacccttctccatttttagtatatattagaggcaagcgacaacattaataatatacatggtataacgttaaaagtattttcttaaaacctacaaaatcagagattacaatagtaactacatggttacaataattttttactagtcaaaaatcaaatatcaatcctcatgcgattaaaattgatgctaaaattgaactgcagccacctccacttcggttcatatgggctggaatcattttgaaatattgcagtagcaatttttggtgcttaagcacttactgcagtaaaagttttgactttgttaatgtcagggccaggtttccttaagcaattggttccgttgctgcagtaattttccttctcttctagtataagataaaagttggaatacatagtgcaacaagacaaactcctgatattgactgctatttagaagggggaccatttgagattatctcttggtgcagaactcaatatttgatatcctgcaaatcttctggccgtgacatcaaactgttgaaggaccgtagatgaaataacactctatctatatacaacgtaacaatatagtttttttttttcttacaccagtatgaatgagataccaaactacattcccttctactactatatcgaacaataatagaaggagaagatctcataatatccttaatttggttgaaaatcatcccacactcagaaatatctttctcattactgtgaatctgatccactaccaatttactatacgattcagtaatcacaatgagaacttgttgattattgagccaaattagagcctgtaagacaccacttgttcttcaccctccttgactgacatatttgctttaacaaagaagttctagcttgtaaaaaatcaccacctccattccttaaacaggctccaaaatccgtgatgccttcctcaacgaaaaatgctgcatcacaattgcacttcaatgttctaaatggtggaggaatccacgcgt

SEQ ID NO: 354 - DNA, 6155 bp, Glycine max
taattttttatatttattttatttttatccttgatatatttaataaaattttttaaaaaaaaatcataattttattatttttatattatttataattttaactatttcaacgactaattttacttaacattaactaatttaataaaaatatttgataagactaactaataagttaattgataaatattaaataacgtaaaaataatatttaatatttttaataacttatcatcttaaaaaataagatagtaatttttttcttttattataaaaagaaaaaggattgcatattgtgtaataagtttattgagaatataaaattatttaatatcataaaaatcaaatcaaaataattttttatctataaaaattaaacaaaatatcaaaaattttaaaacattcacgtatctatttaatcaattaagcaaaatccctttgcagtgcattcaacaaatcatgcgactaatacttccctaatcatagatccaaaaagctttcctttatttattgcacggataataatgatgacacaacagacaacgcaactgctaatttcccgaaagctgacgtgtctcggctggcatggcccgcgcgcactagcatagtagcatatattgcgtgctgcacacactcctccaccttcaccttcaccgattccacgcctccaacaaactcctgctcatgtaaacagaattttatgaataattcagcacgtgacacgattccaatcctcatttgcaaaattaacaactcactttttatagtgttccattataaaatatcctaaaaagatactgttagatggtgtactaacatgtaagtgtaagtgtgcagttgatcgagttgataaatattaggctcatatctcacaagtccatgtcattggcgagtgatcaataaaatactaagttatttagtattatgttctgtcgtaatcctttcaagtcacaagctttaaaagagggtgtaagtgtaacttttcaattcctcaacctcaagataataataaagctaaatcatagtagtgaggagtgactagtacaaacagaatccaaagctttttttttcttcttcttcttcttctttctaacgccatgtctgggagccaccaagagcagccactgttagagaactcgttcatagaagaagacgagccgcaagaaacagcttatgattcgtcggagaagatagtggtggtcggagtcgacgagtccgatgacgaggagaattgggggagagtgccccgattctcgtggaagaagctatggctgttcaccgggccgggctttctgatgagcatagcgtttctggaccctggaaacttagagggggaccttcaggcgggtgccattgcagggtactcattgttgtggcttctgatgtgggccacagcaatgggcctcctgatccagctcctctcggcacggctcggcgtggccacagggaagcacctcgccgagctctgccgagaggagtatcctccgtgggcccggatagtgctctggatcatggcggaactcgctctcattggctccgatattcaggaggttattgggagcgctattgcaatcaggattcttagtcatggggttgtgcccctttgggctggggttgtcattactgctcttgattggtaattcaaccaaccttatccaccctctaatcatttctcctagtttaaatgcttgtaggagtatttagtactattgttttaatgtagttttcaaattgcattaagcgtttggttttatttatggagagtttgctatgtagacagagaaatccgtgaattttggtttttttagggtctatagagggagagggagagaaagtttctcaatagaagtaccaatccaaaacccttaaatttatgatatcataaatttctcttatttttgtttaggtacttacaacattttttttcttgtctaagatctgttgaaattgattccttgattaagctctcagagattttgataggttcaggaccaacccatgataaatgatatgttgtcttgccttgtaagatctagtttttgttatataagttcaaaaccgaagttatttttgaagtctgtgacaacattttgaaagtaactgaaataagtttgttttaagagacattttatgatactttcggaaatctaaggattttgacactattattgataaaaaatttcttgatgtatccaaactcattcaactatttgtccgaaaaataattgtaccaaaactcttagacttctctgagactataacccttagatttatcttgaaccaacatccctagatttctctgggtgctatagcatctctctctctctctctctctctctctctatatatatatatatatatatatatatatatatatatatatttgtgtgtgtgtgttttgctatgtctggtaatcccaaattaaacatgggtacttgtatattttgttgccttgttacagttttatttttctctttcttgagaactatggtgtgaggactttggaagctttttttgctattctcattggtgtgatggcaatctcgttcgcatggatgtttggtgaagccaagcccagtggcaaggaacttcttcttggtaaggagttttatttcattgatttggtcccttttgttttgaatctgatgcagagtttgattttatcattgcaggagttttgattccaaaactcagctccaaaactatacagcaggctgttggagttgtggggtgccttattatgcctcacaatgtgttcttgcactctgctcttgttcagtcaaggcaggttgaccgcagcaagaaaggccgagttcaagaagctcttaattattactcgatagagtccacccttgcccttgtagtttcctttattataaatatttttgtaacaacagtgtttgctaagggattttatggctctgaacttgcaaacagcataggtcttgtaaatgcaggacagtatctagaggagacatatgggggtggactatttccaattttatacatatggggtattggattattagcagcaggccaaagtagcactattactgggacttatgcaggacaattcatcatgggaggttttctaaatttaaggttaaagaagtggatgagggcgttgattacccgaagttgtgcaataattccaactatgatagttgctcttttattcgatacctcggaggaatcgttagatgttttgaatgagtggcttaatgttcttcagtcagtccagatcccctttgcacttattcccttgctttgtctggtgtcaaaggagcagataatgggcactttcagaattggtgctgtcctcaaggtattttgtcattcaatcttgcattttgatctcactggtcacttattgggtgccattatgtatctgataaaggactttgtgatgacaacttaaattcatgttgtatgaagttgctgtctctatatgcctatattattcatctatgatatcaaccttaaaatttaattaggaaggatataatttagaaatggccaaatatatagaccttttcttcttgcagttggggataatttagaacatactcaatctcttttgcaatttattgttagattctaaagtgacaaattagtgagcttggttgtattctcctgccttgataattgaaagttgtgcagtagactactatgttacatctttttcctttatgatcctacgcattatgggctgttgtttatcttgcaaataactatccccatgtcattataagtacttgatacagttctatgggattttttttttatcttttttgttatttatcattttaattgtgatgtgttcaatattaatatgctgtgcagtatattgaatattcctgctgctggaaacagcatatgatgtctgcatggactcaatttactgtaaaatatttaggatgcattgatccttcctcttaccttgaggatgttgatgttccacttttatcctcatttacttcaagtttgtgtcattatttagacttaatttctcataatatacttgtagcccacatctttgaagtagtctatcactcacttgcacacacggtttgcttcatggttacatgcagcctgccaacataattatcattgatgtacactttaattgcgttagaaaactaatatattgttggagttataatagaaaaatagggtattgtaccactttcctttattatgcaggggattctggggggtgtatgtgctgttattttttatattccttaaaattgaactctagcatgctatatttcaagataatttatgaaagagaccaatttgaattctttgtctgtaacaatttgcagaaacagatgcattgtttatactgacttgtattgattaaattagtaatgatagaaaataatgtctgtctgtcagtgttgtctcacctgggaaggtagaaggtttgtgtattcttgatattttgataatataactttaggtatattggacaaaattgacttgtgcagtctgcagacattagttttgaagcctcctgccttgtttctttcctttgttttctcttttggatatggtggattgatgctgtgtgttttcttttctcaattgaacttgctcagtgtattttaacctttagtgggttttctccataacttctatggacattggatgcatttggtttctgtactaacccttcttcccatattctgctcatagtttgttttgattaagtacttaatcacttctgatatgtgtacagactacttcatggctcgtggctgctctggtgatagtgattaatggctatcttttgacggaattcttttcctctgaagtgaatggaccaatgattggcactgtagtgggtgtaataactgctgcatatgttgccttcgtagtataccttatttggcaagccatcacctatttaccttggcaaagtgtaacacaaccaaagacaattgctcattcagagggttgaggttgagtgatcaatctttaaaatcgcggaataggaagtgccatccatttttaagtatgctcatgcttgtttgttactcgtgtgacaagttgatgcaataggtggtggcaccttattctttgcctgtaattataaactatgtcagagtagattttagctctgtattagtactttcaaattttgttgtcaaaatgccttggcaacactctaattagttgagacaccttcgaagctgtagtgtgcaaaccagcaatgtagttctttttccttgctccctcgattttactcatattctatagggtaataatcttttaaggttgtagcatgaaacaatctttcaaggttgaagcatgaaacaaatcttttaaggatgaaacactctgattagttgagacacctttgaagctgtagtgtccaaacaagctatgtagttcttctgtttaacaacttattgagagaattgaatgatttttattacacttacagggtcatagaatttgcagcatttaaaaccaaaatttgatactgaaaattaaggtgcaagtacaggaaattcgaagagattgcaatcctgtggttaaccattttttccctatatttttgccttgaaagttaagtaatgacggtaatgttatttgtactaaactgcatggtccattcagaagcttaggacggtttgtcaatttcaattatgccatactttatagctgcaaggttttgtttgctattatcgcaaacattttttttttagtacaagaaaaaatttctgcaattacttttcattggtcagtgttactgagatatccacgaaacatatttttcattatgctacataccatgaaacaaatatatgccgttatctaatattttaattcaccacctttttctcctttcacaatctaacaagtcttaatgcctttgtactttctgtcccaagcagtggcagagcttgaagaaatattttgaggggccaaaatacaagtatcatttaatgtaaatttaatgttacataaaaatattatcctaaaatctttaaaactaataaatgatagttatttaatttctaatattattaaaagatagtcattttaatctttaaattataaaaattaaaatgtttggtatttaataaatgatatttttataatcaaataattaagtcattcaaataagaattaatttgatatattac

SEQ ID NO: 355 - DNA, 6243 bp, Glycine max
tagctgttcagcaagttttttcttaaatcatatttaaagcaaccacagtcctggcttatactttttatataccgaaagataagccagaatttgataactgttagtgttggtcctatcacatagtattatacaaaagctataaatcacgtttcgttactctagtatctatttacttgcttaattttttgtgaaaagctccagcgtttattttgatccatacttgattataacacagcatgacagcaatatattgtcaaaatttacagatcttcctggaaaatacaatgcaattttgccttcagaggttaaagaaataaaataattggctagagttacaatcaacccagataagatatacgcacgtcaacaattctcatcccttgccttaatatcaccggaaaagaattgtcatggtctcatggaggcgatctatctttaccataacatggatttgggatttcaaaataacttctgaattttgtaaaagataaataatgaagtgaacatatttatacgtcaatgtttttatatcaaacatcaaactaataaaaaacaataaatcatattatattgcctttatatgggatgtgtcattctttgcatgcggtcctaatgacacttgcacttggggtcaaattaaccatcagtccatcacatgcacattcattattctctgttcatacatcatagattgtcctttctgcatggaatctgtgtgacacctcgcatttttgaggattctgtgcgatatatatatcctataaattaattcacgtacttagggtgaaaaaaatgttaattcatattgtttactaatatatgtatcattttaattgcaacattaaaatgataataaaataaagtgagtaagtaattaatcatccacacattttagtagtacaaatataataataaaaagcacttgataatagctataaatactcaagtagcttggttggttttctcacaagtcacaagcttttctttttcttgttctttaattttctgattttagcaaattaaaatagtagtgttattggtaggttttggcaaagatgttttcagttccaggggtgtcgggaatcctgaacagaggaggagggcataagataaaagggacagtggtgttgatgaggaagaatgtgttggacttcaacagcgtggctgatcttactaaaggaaatgttgggggactcataggcaccggcctcaacgttgttggctcaacacttgataacctcactgctttcttgggccgaagtgtcgccctacagctcattagtgctaccaaacctcttggttcatttcttcttccttccacataatcaataacttctatattcaaaattaagtgtttaatctctatactctcattcatttcattcaatgaaaaaaaaatcataagacttttaactaaaattaacctatgtaaagaatcgcaaacaaaaaactatataatattaagtttatttactttttttataatgacaaaaaaaattattgtatatggtgcacaaatttttgtactcttaaaaatatatcactttatacatagccaaacatatttattttgtatagtattaacttatttgggtacgtaccttaataatattattatgtgtgtatgtatggtctgtttgtagcaaatggaaaaggaaaagttggaaaggatacgttcttggaagggattattgtgtcgttaccaactttgggagcaggggagtctgcattcaatattcagtttgaatgggacgaaagcatgggaatccccggtgcgttttacataaagaactacatgcaagttgagttttacctcaagagtttgactcttgaagacgttccaaaccaaggaaccattcgctttgtttgcaactcatgggtttataacactaaactttacaaaagcgtgcgcattttctttgccaaccatgtaagctatttatattacgtacttagctagtagtttataattaaaattcagtatgtatatatatatatagttcatttgtccgtctctaatggcaagatctttaatacgttaatttaatgaattgtagacatatgttccaagtgagacaccagcagcacttgtggggtacagagaagaagaattgaagaatttaagaggagatggaaaaggagagcgcaaagaacatgataggatctatgattatgatgtctacaatgatttgggcaatccagatcacggtgaaaattttgctcgcccaattcttggagggtctagcactcatccctaccctcgtaggggaagaactggtcgatatccaacaaggaaaggttagttttctatatatgcttctatttgtttaagtgaattgatattatatgtgtgaagctaatttaatttattttagcattgttcttttacgatgttatggccagccaggttcaaacaagtgaaagtatctatgcgtacatatttattttttattaaaatgattttatgtatataagttattttgtgctatgattctgatttatttttcctaatcaatttcaacagatcagaattctgagaagccaggcgaagtttatgttccaagagatgaaaattttggtcacttgaagtcctcggattttcttgcatatggaataaaatctttatctcaatatgtcttaccggcgttcgaatctgttttcgatttgaacttcacgccaaatgagtttgatagcttccaagatgtgcgtgacctccacgaaggtggaattaagcttcctacagaagtaattagcacaattatgcccttaccggtggtcaaagaactctttcgtacagatggtgaacaagtcctcaagtttccaccacctcatgtcattcaaggtgaagaatttgctcatacttgaattcttgaatgacactttgctcatacaaatggtatcgtaccatatattcacaaacaaatgcaaattaaacttatgttttttttattaaatatttagttccatttaataatgattttcttcatatatagtgagtaagtctgcatggatgaccgatgaagaatttgcaagagagatggttgcgggtgtaaatccatgcgtaattcgtggtcttcaagtaagtttaaatacttattgcagaaacagattggcaaaccaaatttcgtgtccacattaaattagtctgttgctagctagttataataaccattatatatatatatatatatatatatatatatcatgcggatccggagtcacgtacagtttatcatatatattttgacatgcatgatattcttctttaattggagtataatggattgtaggagtttcctccaaaaagcaatctggatcctacaatctatggtgagcaaaccagtaagataacagcagatgcccttgatctagatggatacacagtggacgaggtaaacatattcaagtctcataatttaaccacaggaagaaggaactttaagtaattaaaagtgcttgtgtatgatctgattacaataaatttaatttgtggcacaggcactagcaagtcggaggttatttatgttagattaccatgatgtattcatgccatatataaggcggataaatcagacatatgccaaggcttatgcgacaaggactatcctttttctgagagaaaatggaaccttaaagccagtggccatcgaattaagtttgccacatcctgctggggacctgtcaggtgctgtcagtcaagtcatcttacctgcaaaagaaggtgttgaaagtacaatttggctactggccaaagcttatgtggtcgtaaatgactcttgctatcatcaactcatgagccattggtatataaaacaattcaattcaatctccatctatgatgtatgttatgtctcaattttattttatttttattttttattttgttcataggttaaatactcatgcggtgattgagccattcatcatagcaacaaaccgacaccttagtgctcttcacccaatttataagcttctaactcctcactaccgtgacaccatgaacatcaacgcacttgctaggcaatctctcattaatgctgatggcataatagagaaatcttttttgccctcaaagcattccgttgagatgtcttcagcggtttataagaattgggttttcactgatcaagcactacctgcagatcttatcaagaggtaattaatctctctaaactctaaacataaaactatgaaatataggtacatagtttgttattgatttatattttgtttgattcagaggagtggcaattaaggatccatctgccccacatggacttcgacttctgatagaggactacccttatgctgttgatgggctagagatatgggctgcaattaagacatgggtccaagaatatgtgtccttgtactatgcaagagatgatgatgtcaaacctgattctgaactccaacagtggtggaaagaagctgtagagaaaggtcatggtgatctgaaagacaagccatggtggcctaagttgcaaacaattgaagagcttgttgaaatttgcaccattatcatatggactgcttcagccctccatgcagccgttaactttggtcaatatccatatggaggtttcattctgaatcgcccaacttcttctagaaggttgcttcctgagaaaggcaccccagaatatgaagaaatggtgaaaagtcatcaaaaggcttatttgagaactattacatcaaagtttcaaactctagttgacctttcagtgatagagatcttgtcaaggcatgcttctgatgaggtctaccttggccaaagggacaacccacattggacctctgactcaaaagcattacaagcctttcaaaaatttggaaacaagctcaaagaaattgaggaaaaacttgcaaggaagaacaatgatcaaagtctctccaatcgacttgggccggttcaactgccatacactttgctccatcctaacagtgaggaagggttgacttgcagggggattcctaatagcatctctatctaagggagcatgtggtctactttaattacagtactgtacctaccttccaataaaaaagatgcaaggctagagatccaataaatcttgcatcctatctaatgtttcaattatcttgtgttttaatgctgtaatggagcctacaatttgcaaattaattaagagcaccgagcactattagtttgcgtttagcttctgtcatgtttattaagatatatttcgcagattgtaacacaaaattttgtggcaaaacaagcttttttttttcttattgaaaataattgtactttgataatagaaaattcagcaaattaggccttaaaaataattatttagcagttatttgcgcttaattgttaaagaattgatatttcgtgaattttgattgcagatataaaaattagaggtgttaaaagcaaatagaaggaaataattagaaaggctcaactcattctctcgcgtagcgtgtagcgcgtgctaaacgagacgttaagcacgagagtcagaatccgttactcgcgcacagcgcacagcacagactaagtggacaaaactgacacagaacacgctaagcgagaggagctcgctaagcacaagatctgaatgcgctaagcgatgggtatcgcgctgaacgagcctatgaaaatccaaaacccactccagcaactgtaaatagagagctcagtcaaggaaaacgacacaatgagtctcagagtactcctatcactaccttaagcctgaaaattcctcctctcttctctctatcaattgtattcattctttcttccatccctctcattgtaagtccctcaatgatcatgagtggctaatcccctggttagggtcaggcaggcctaaaaagtcaaacgatgtatggtgaacttcagatttatcaatgcaagaggatcccttttcaggtttttctgttctattttcttttttattttatcttgcattctcatctttattttcttttgggggttagttactcgggagaggataacttctaataagatctaaagaaaagatgcatgcattagttttaggagttagtctctcgggaaaggataatctctaatagaacattaaagagaagaaatcataaggtaatcattgctaggcatagaatggtaactttatgctcatgcattcaacaaacatctaaaatttattattcatgcattttatttattgagtcttttcaaaagcatttaggagataggtaaataaaataggtttgtcatcgtgaggcatc

SEQ ID NO: 356 - DNA, 5744 bp, Glycine max; identical to SEQ ID NO: 304

SEQ ID NO: 357 - DNA, 6316 bp, Glycine max
tttttatattttgaaatcatatttgaatgctttcgtaataaaaattaacttagagtaaaatgcattacacaattacacaattttacatcaggcaaaaattatttaaaattacttcaatttataattatttatggactcaaaatctaggtatgattgtatgaattcatttctaatgtaaaattaaatatctaaaaatatatctaaaatcaattatgaattgagaattaactttttaacgttaaaccaaacatgcactcaaagttatttcaacttataattcattttaaaattttctataagataaaatcaaacatgtaagaatatatttaaaatagatccaaaatcaattttttaacatcaaagcaaacagacacttatccaaatatttattactcagattatcaatacaaagttccaattttgatcggaaaaaaaaaaccaaaagtacctatgtatgaaacaacttataagttttatttattttcaattagttttataagaaattaattagtgaataaaaatatttattacattaaaaagtaaacaaattactgtatttttagtcgtaaaaaagctcaataaaacttataaaaataatgttgtatcttcctataaatcctcttctcgcttttaaaaaaagtactattaaataaaaaaaaaatattaatgtcttcagtatatgaatcatgttaaaatatttattataaaaagagagtaagaaaatgttgtggggaagatttaaaattatccaattcacaaatgtactcaatagtaactactaactagtaagaaggaaatgttgaatataataattattgatttttatctggtttggttctttgcatgcacgtatatgacagtttggtttgcacattggagtctgagtccgctacaagacatttatgtatcatcatcttcgtttcttagtcttcctccttaattataaataccaccaggggctgtgcttggcatcctcacccaaaaaaaaagatcatacatagtagtgttggtgggttgcaaagatgcttgggggtcttctccataggggtcataagataaaagggacagtggtgttgatgcgcaagaatgtgttggacgtgaatagcgtaaccagcgttgggggaattattggtcaaggtctcgacttagttggctcaacactcgatactcttactgccttcttgggccgatccgtgtctctccagcttattagtgctaccaaagctgatggttccttttcttctttcttatttttcctaattacttcatccatgcatgcatgccttcaattctcacctatgttgctcatcaactgatgccaacatctattagtgttttcgtttaacggtgtttcatttcaatctatcctctcacatacttctccgttcaacggagtttgaattcgtgtaaaacataaaccatacacacgctagatgtttataatcatgacgcgtgtcctccttgtgtgtcttcattatttgttatatgagatttgaatatgttattaattattagtatagcatgtgcagcattctcactctcttaccaagctagctacgtttgcacgcacgtctataaatgtttaattttttgtttatgtgaaatgtgaaactaagtcatggtagaacggcttcatattggtttttacttttgttttcactctttcttttctttgggtagccaacggaaaagggaaacttggaaaggctacctttttggaaggtatcattacttcattgccaactttgggagcaggccaatctgcattcaaaattaattttgaatgggatgatgggagtggaattcctggagcattttatatcaagaattttatgcaaactgagtttttccttgtgagtttgactcttgaagacattccaaaccatggaagcatccactttgtttgcaattcgtggatttacaatgccaaactcttcaaaagtgaccgcattttctttgccaaccaggtcaagtataattaatgaaacttaaatataacttttaaatcttcaataactttgtttgttttctctagttatttcatttttccaaaaaaaagtttttgtcaatacccgagtgtcaattaatgtggtttattttgaagttgttgaactttaaggcatcaatgaaaaaataaagttaacaaaacatattgcagacatatcttccaagtgagacaccagctccactagtcaaatatagagaagaagagttgcataatttaagaggagatggaactggagaacgcaaagagtgggaaaggatctatgattatgatgtctacaatgatttaggtgatccggataaaggtgaaaatcatgcccgtcctgttcttggaggaaatgacacctttccttatcctcgtagggggagaactggtagaaaaccaacaaggaaaggttaggcttctatttctatttttaaattactctatcacagactcaaatctgttcttcaattctataatatttatgaggtcttagcataaatgtacttttaatatgtcaagagtcatataactttgaattggtatattgttttagctagaagagttctacatgtacatgttaacataaaggttgactgtttctaatcaagtaatcctaaattatcaaggagtacttagaaacaaccatttcattaaactttaactgtttttcaattatgagtttgaaaatttctgtttttgttgctaataagttctgctattttcattaaacagatcctaatagtgagagtaggagcaatgatgtttatcttccaagagatgaggcttttggacacttgaagtcatctgactttcttacttatggactaaaatccgtatctcaaaatgttcttccattattgcaatctgcttttgatttgaatttcacaccccgtgagtttgatagctttgatgaagttcatggactctattcaggcggaattaagctgccaacagatataatcagcaagattagtccactacccgtgcttaaggaaatcttccgaactgatggtgaacaggcccttaagtttcctcctcctaaagtaattcaaggtatctcataatattaagtacctgtatctaaaatggcgttacaattaacaacattggagtgctaataatggatatctgaattaatcctatttcactaaggatatttgttattatttgagcagtgagtaagtctgcatggatgactgatgaagaatttgcaagagaaatgcttgctggtgtaaatccaaacttgattcgttgtcttaaggttgagttttctttgcatgtcaagtttgtgattgatatccttgattggcaggatgacccaatggaggaggatcatatatatttccttataatttattattgcaggatttccctccacgaagcaagctagatagccaagtctatggtgatcatactagtcaaataaccaaagaacacctagagcccaacttagaagggctcactgtagatgaggtatataatatgataaacttgtgtttcgaaataaaattttatttgatgaattctgttattttatgtgtctagtttttattttagatgatgtttctatgaataataagagtaaattgtatttggttggaaaggcaattcaaaacaagagattgttcctactagatcatcatgacccaatcatgccatatttgaggcgaataaatgcaacctccacaaaggcttatgctaccagaaccatccttttcctgaaaaatgacggaactttaaggccacttgccatagagttgagtttgccacatcctcagggagatcaatctggtgcttttagtcaagtttttctgcctgcagatgaaggtgttgaaagttctatttggctgctagcaaaggcttatgtagttgtgaatgactcgtgctatcatcaacttgtcagccattggtatacattttctcaacgaaataatataaaaataaataaacttatatatatatatctataaaatgattattaatatcttttgatggataataggttaaacactcatgcagttgttgagccattcatcatagcaacaaacaggcatctcagtgttgttcaccctatttataaactccttcaccctcactatcgtgacaccatgaacataaatggccttgctcggttatcactggtcaacgacggtggcgttatagaacaaacatttttgtggggaaggtattctgtggaaatgtctgctgtagtttacaaggattgggtttttacagatcaagcattgcctgctgatcttataaaaaggtaaatcatatatcttacaataggaaacatgaaactcaatttaatttatagttaacaaaaaattgaagacacttttgatgttatataattaatgtcatgtgatatagaggaatggcaattgaggatccatcgtgccctcatggcattcgccttgtgatagaggactacccttatgctgttgatggacttgagatatgggatgctatcaagacatgggtccatgaatacgttttcttgtactacaaatcagatgacacacttagagaagatcctgaactccaagcctgctggaaagaactcgtagaggtgggtcatggagacaagaaaaatgagccatggtggcctaagatgcaaactcgtgaagagctagttgaagcttgcgctatcatcatatggactgcttcagcacttcatgcagctgttaattttggacagtatccctatggaggtttaatcttaaaccgtccaactcttagtaggcgattcatgcctgagaaaggttctgctgagtatgaggagctgaggaagaatccccagaaggcttacttgaagactattacaccaaagtttcagacccttattgacctttctgttatagaaatcttgtcaaggcatgcatctgatgaggtgtaccttggggagagggacaatccaaattggacatctgatacaagagcattagaggcttttaaaaggtttggaaataaactggcacaaattgagaataaactctcagagagaaacaacgatgagaaactgagaaaccgttgtggaccagttcaaatgccttatactctgcttttgccttctagtaaggaaggattaactttcagaggaattcccaacagtatctctatctgaagaggtttgtggttccttaagttttgtggctttgaataaaagatagaagagaaggaatctgaatttcttcatccaacctgcacatggtaatctagtgtgtttgagtgctttcatgtttggctttaataaaataaaagcagttgttttgtaaaatgttcagaatcaataaaagcatttactgctttgctttgtgcgctaacgttagtcatctaacttgaatagaaataaataatgagttggacaaaagctacaacggcttgataacccattgttcaaatataatccgtaatctttgttttattttttgttacaagagatataagaaacaaaatatataatgcaaactttattattaaaattatattgggtaagaggttggtgtctgaccacgaatttgatggtcaacctatattgataacatcacaggacgcaactaactacccaaatatcgttattataacatataaatgaaagtttacaaattgaagagaaccttgtgcacgaggataacttttttatcattccattcagtctattaacaatgtacatgacataaaattagtaaatataaaaaagaataatccttgaaggcgttaaactcgaacaaacctggtcaattagaagattttgaagtttgggacaatgcttgaatttgcaatacatcttgaatagtcgaattcaatgctggttaaattgggaaattcgggaatcaagccatcaatgatttccacttcgtcatattccatacctaagaggtacatcccaacaacaaaatatcatagattcccatcttccttacaaatagaaagaaatgacaaacaaataaagtattcatgcgcaggaactcaacgttataaacaactttcaatggaattatatgtttacaaataagagctctgactaatttcggcaattttttaaattttgcttcaatttcatagctatcaaatcttaaattttgctttaatttcatgactatttaattacaaaaattttattattttttaaaattttatttatttttaaataaaatctttttaatttattttacgaaaaataaaatattacatgagacatttgatccttacattttaaaaaaattcaaaattttagtttttttattttaaaatacaaacatttaatttttatattttagaaatttcctaatacttgttcccgtattttaaataatccataat

SEQ ID NO: 358 - DNA, 8691 bp, Glycine max
taatacaaactaaatttgagtttttacaaacccaatttatttaacagtttttatatattaaagatagttaatgtacagtttttataatctaaattaaataaataagttagaggatctgattttacaaaaatattttaaaaaatgtaattatcaaccacaaaaacagaaattggcacagttataaattaaaccaaaagttttataatatttttacatcattcataacgtgtgtttccaataaaaacaaattaatatgttttacacttgaaattatttatccatgtcttgtgtacacatttcaatatgaaatatacagtcgagattaatttaaatccacatcttaattaacttcaacattttataatcatttctatcacaatcagttttacttaattttaaaacaaattgacaccaaatatagaacccagtagagtaattagaagaagagacttttaattttaaacaaagtttaattttcatgtatgatcaatatatgatttttatattattaattaatgaaacaatattttaaaataaactcttttaaataattttatttcaaaatatcatttaataaaatgacttcgaattataactatttattttcattatttaaactcgcaaattacaaaatccataagatatttgttggagacgaagcattttccaaaacggcagcaatctgtacttgtgagaaggtaaaacaaacaaaaactattaactatattacatacaaaaataaaataaaaagcaaaaacaatcgatcacaacaacgaatcacggttgcaccacgtggcgcaccatgagaggaggggattataggtccggtaccagccagtggacggtaacagtacactgaatcaagggaaaacgacggcgtttcatggagctacttggtggagtcttatcattcatatattattatttatatttattcatgctattatgcatataaatacgtgtctttgggaagagtcgtgtataccaaattgcttaaggtcttcaacttcacccattcatacgtggtgttgttactgctgctcttttctcttttcttttctctttagttctctcttcccctttctttttctttttcttcttcttctgagcttgtttaagcttttcttccattaacatattatcacaatgtgtggtattcttgctgttcttggttgttctgatgactctcgagccaaaagggtccgcgtgcttgagctctctcgcaggcaatgaatttattcttctgtgtttagagttcgtagttgagtctaatttcgatgcactataatataaaagtttttacttgttaaattgatggatgatttttaagattattatcataaaaattaataaatttatcatataatatcatctaatactaaaattaaaactcataactacatatatacttttcacacttcttaatattagaccaaccttaatgattcaaatcatacttatttattagtatatatattttttagaattttataatcttaaaaggtgagtttaaagttaacttaatcttaaaagttagtttaagggatgagaattttttagttcacgtgaaacttgagttttttttaatacatttccgcacgtctaacctttcttaggcttggtgtgtgatcttttggatgaatcttaaatataatctgataccatcttaaaatacaagtttaagtttaactcaactcaaaaactaatttaagaaataagaattttcccttatatattctaaatcaattttatacttatgttttttccaataatacttttattatataactatttactttttgttatgagttaataatttctttacacattcaatgttaaaaacaatgctatctttcggttagtctacaaaccaacctcgttttaatatcatatagtttggttttcattaatttgggtgctttggattacaagttcatgctgaagaattgatggtaccagcaccagcaaatcctttgttggaagtgattgatttagataacaaggcaccagtctatttgacagggttttgtgatagagtcagtgtatgatttgtgacatttcaatttgaagagataatcagttatatttatttattttttttataaaaattagtaaaatagtttttttttttaaaaagaataagtattttgacaacatatagaataaatatgggacctaggtgacgaaattcatgacctcgtttcaactttcaactggttcctggtccgtcaaaaactttaaaggaatggattaatcatggtggagtttgaaattaaaattgctttttatgctgggactcttatgtccatcagtgagatttaggatacatgacgttgataaggttaagtgcgcaactatgaaataaaatatactctgaagtcactgattgtttatgaataagataaagtagtgagatgatcgatcgtgagctcctggttgaaattcaattattggtagtaatatttagtgagaaccttccaaaagtggatgacgattgaaaatcaaataattaaaagggattacttggtcgtagaattattcgattttatttaatgaaaatgatttttcttattttgtttttaacgcttacacatatatgacaacaaaacatctattcaaaattgtatgatttgtgaataaaatttaaattaagtttcaagtttaataagcatgtattattagtataaatttttaacatagcatctaattttaaattattgttgatataatttttaagtaattattataaaatataacaaacatgctatacatgtcaatttatgattgaacctcagttttaaacaacaaaaaatgttatatattaatgatacaaaataattttacattattatttaattgtttgattattttaatatttttattaatttttataataactattagtacttaaattatgatatcaggtttattgacaatatgatttttttttatgttgaatgcatgtactttttctgttttttttagtgttgaatttttgaaaaaaaaattatatttatctatcatttgtaaagtttaagatcacattaattatacttttatttgttttataatatttaattattttaaatatatatttattgtggagtgaaaaaaaataaaaaaataaaaaaataaaattttatgaatattttattataatcaataaaatttattgtctttttagatttttatataacaaccttgaagcacaccttaaaaggaagggagagagtattatttattcttaagtttgttaaattctgcttattaacttctcaaatcaaacaatgatacataaatattttctgatattaaatggttagggttaatggcatgttacataatttgcatattattgaaatttgtttgtggttgttgacgtcacagattgaagcaccgtggccctgactggagtgggctccatcaacatggtgactgctttttggcacatcaacggttagccatagttgatcctgcttctggggatcaacctctctttaacgaggacaaatccgtcattgttacggtagaccattgcctaaacaacaataatagttctacacgatagtttttttttctctttcattcatatgttattatgatgatattggcaattttaacgagacaaacccgaatcttctataccatcatgatgtgttgttgtgagggttgatgcaaagtgttttgttgttatttatttatttcagttattaaattttgtatcttattgttctaatttaatggatgtaaatcatgattgatgataaatcgtcatataactttaaaacaggtaaatggagagatttacaaccatgaagagctcaggaaacagctgcctaatcacaacttccgaactggaagtgattgtgatgttattgcacacctggttagtaatatttaagatttatgtataataacttctcaattgagatgaattaactttaactaagttatttgtataaagtattttcgactttaatgatcacaatgaagatagttcatgtcatgggtgcgtgcatcatgtattaagcaatacgactattttttttttttaatgaaaatgacaggcaaatgaatgatcagcgttaaaatataaaagtcacgtaattttcttaagtaatacatttaaataattttcaatcttgattatactaatatataattatgatgtcaaaatttaatactaaccatacagtcatgcatgaatcattaagattgttttacttaaacatatttgattatccattagtcaaaagaagtttttgaagatcatttctttcatgactgtcattttttcttagtctaagctaaaaattgaagcaatcaagattgaatatgtagttcttatcaactcattgttattgatatttgatgttaatgttttcaatagtacgaggaacatggagaagactttgtggacatgctggatggtatcttctcatttgttctactggacacccgtgacaacagttttatagtggctcgggatgctattggggtcacttccttgtacattggatgggggttagatggtaataattcataatatattcaacttttgaattgaattcatgggtttttagtttgtacttgaattttggattgaattgaatggacaaagtgtgacaagtttggtaccctctctgtattctgcaggctctgtttggatttcatcagaaatgaaaggcctgaatgatgattgtgaacactttgagtgttttccacctggtcacttgtactctagcaaagaaagagggttccgcagatggtacaatcctccttggttctctgaggctattccatctgccccttatgatcctcttgttttaagacacgcctttgagcaggtttgattcacaaaagtctaaggtcatgtttgaataaacttctctataaacaaaaaaataggaaaggaaaattagaaagtaaaatttaataaatttctactataaaattattattagcttatatataagttaaagtcaatttttgaaaaaattaaatagaagaacacaaattagtttatgcacaagttaatttcaactaatgggaaatgcttattttattttatatttttattttcttctcctataagtgtttatggagaaatttatgcaaacaaggcctaaggacaatcggaattggaacttcatgtaactcttaaagttccttttttttgtgcaacaatttttgcatgaacaaaataatctatagatacaatgaatcaaatgctcaagataaatgttaaataacttcaacaaacttcattaaatagtgtgtactattatttaggtcttagtaaccaatgttcttagggtattagttaagaaactaaaatgataaagtatttataatgaagattatagacaatgtaaaaaaaaagtaatggataatgtaattttatgcattctaataataatattttttttttaatttcttaactaatatccttaggttaacatttgccttattattttaacgcatcttgagtaattgtttggttgggtccataggcactatggtcatgctagaattactgtttgaaagctttttcatgaataaagctaacaaaaatgaatgtgattacaggcagtcataaaaaggttgatgactgatgtgccttttggtgttctactctctggaggtttggactcttctttggttgcatccatcacttctcgttacttggccaacacaaaggctgctgagcagtggggatcaaagttacattcattctgtgtaggccttgaggtgtgcaatctaatcaaaactacaaatgacattgcaaatttaatagttgttttcatgaaatcctttaatattgtattaatcttttgccatctcatattgagtagggctcaccagatttgaaggctgcaaaagaggttgctgactatctaggcactgtccaccatgagtttaccttcactgttcaggtaactaaatacatgaaaaagtacttttcagctcacaatttggggtccttcaatttattaataaataattgatatatggtgtgtgcaggatggaatagatgccattgaagatgttatctaccatattgaaacatatgatgtgactacaattagagcaagcacacctatgtttctcatgtctcggaagattaaatcacttggtgtcaaatgggttatctcaggagaaggatctgatgagatctttggagggtatttgtacttccacaaggcacccaacaaggaggagttccacagagaaacatgccgcaaggtcatagatttatattgttcattgacataaacaatacctagtgggataaagctttgttgttgtttttgttgttgtattgacataaacaatataaggggttgaagttcaagggataatagttatgttttttatatgcagatcaaagcacttcaccaatatgattgcttgcgagccaataaatcaacatttgcttggggtctagaagcccgtgtaccatttttggacaaggcgtttatcaatgctgcaatgagtattgaccctgagtggaagatggtaagagtaaagaatatgatttggctggttcatgactttaaaatttttaagacacttatttagctggtttactaatttaatgttcagataaaaagagatgaaggacgaattgagaagtggattctgaggagagcctttgatgatgaagagcatccttatctgccaaaggtactatgcaatttgctgcaatgtctatagatctttgccaaattagttggccaataaaactaacatctaaacatttattttgatgcagcacattttatacaggcagaaagaacaattcagtgatggagttggctatagttggattgatggccttaaggcccatgctgcaaaacatgtattgaatccaacctttttactacaattcaatgatggggtttgctattgtcatgaaatttattttgcttataattggttcttgtcaatttttccataggtgactgaaaaaatgatgcttaatgctggtaacatttacccccacaacaccccaaaaaccaaggaagcatattactacagaatgatctttgagaggttcttccctcaggcaagttaatcaaccaactcttaatttagtttcttaaaatttggatttaagcctaactgaatcccagaagctaataggtgaggattgcctccaacatatatacactattttgaacatatcactatccaatgtagaatctgtaacataattaaataagggctgattcaaatgtgtgtttgttgattttgttctgcagaactcagctaggctcactgttcctggaggagcaagtgttgcatgtagcacagccaaagctgttgagtgggatgctgcttggtctaacaaccttgatccctctggtagagcagcacttggagtgcacatttcagcctatgaaaaccagaacaacaagggtgtagaaattgagaagataatacctatggatgctgctccccttggtgttgccatccagggctaatacaaagatgtgacaaagaataatttgggcgacaatgaagataactaagctaaaggtgaatgaaaaatttgcctgcagtgtaatttcatctgggcaaagcttttatagtttatagttataaggctttctaaaaagtgttgcgtattgtattatcttgaatgctgtgatttgaagtcttaataaaagtgtttcctttatcagttcataatgaatgcaaagtccattattttaggctgtattttatttcacttttaattagctgaagcatattcgtcgtgttaagtaaaaatgactttgaagtctcaagatactggatactgaaaagaaaacgattcacagtaacacaaaaagtatgaactcaaattatttgatatgtatgagattttagaaactactccgtgaaatactggagtataataaaaaatgcatataaattgaaaacggacctacacgtgaagtaacatcactacctgagaaatgagaattgttagtcaaggcataacattggaattggaagaaaaaaatagtgttaagtagaatgggtcttgacacagacactagccaagcccaactatagctggacattatgatcacaattaagagcccaaataaatagcagcctagttctatgccaggcagttgcttcctgcattccaaaaattgttttatgcaccaatttagaatttgttttttttttttacctttcggattggccaatccagaaagttatttttaaagtgcatgaagcaattgccttttatatatccttgtactcggtgcaaaaagtttctttttttttggtggactaagaaaagttttatttacttggtccacttaagacaaccattacctatatactgatcctgctacgtaccggaaagaaaaatcaactcagattctgctacattgctattgaaatgtgcccatgaaatagatgccgtttgattttttgagtggttattttatgtttttatttttatttttaaatttctaagatctataaaatatgtaccggtggaaatttgtcgaaactacgtaatcttgaattatgtaataattctcaaagggagaaaataccatattgtctaaaatcatatatatgtttatgactgatttttatgtgataagttattaactattttttataaattgaaaaatggagttacgaattatgtgtgaaaattaaccagatcacaaaattcta

SEQ ID NO: 359 - DNA, 7152 bp, Glycine max
tttaaattaatatcggaagactttatattaagagacatttttcttttaaaatttgatccttttcactaatgtgactaactatctaattatcttttgctgtaactaatattttattttaaattttgattaatatatttttataggcttaattattattttgatcttttattttatttttgaagtttaatttaatcctcttattattaaaaattaatctcatttaacttgtcacttccacaattactctttttatttataaacaatgattacaataataaaaaaataaagtatttacataactaaattttgattccataatcatgtaatttcataagaatcttaattatatataaaagaagcatatttttttttcagtttccaactatttaatccctatcaaaattattgattaacaaaaatgattttatattttttaattaagtaatttaggattcaaatcttaatcttaaatattataataaatcatattgaaaaaaatacttacattatttatgtttataattttcaatagagatcattattttttgcagtcaatatttcataatttataccaataaaaaaagtattgaatcacttcattgaaaaacacaacacaacttgacgtaacacttgattgattctaatgaattctcaaagaatttaaccaaagaaaaaagtatttaaggaataaggattaacggataaacatctctctctctcctgtattcggagacaagacaaaacgggaagcagcaaatcgctcagcacaaacgagaaaaggaatcaaataatgaaaataataaaataaaaactaaccttaatacaaaataattattaaatgaagtgagaaaaatattccatagcaaaccacgtcacaccacgtggcggttggcaagacgaaagagtcggtcggtggtcccggtgtgagcgaccgggaccacccggtatccagttaacaattcccacggcattgcagaaagcgacatcagacaaaaaacgacaccgtttcccctccaccctttgcatataaatgcgtgtacgttgttatgtggatcacttaactctttcaacttggaaccgttcttcgtgttctccattccctctctcactccttcatctacgtaatttccttccttcctttctttctttctttctttctttatcttctcatttttctcaatacaatttttttctttctttctcaagttttgctacttttctcttcttaaccatagttcacatattatatcatcacatatcatagtgatatcatatcacaatgtgtggcatacttgctgtgcttggttgctctgattcatctcaagccaaaagggtccgcgtccttgagctttctcgcaggcaatgtttctctctttgtcttcttatatatacacacacgtaccaatatcaaaggaagaaggaaaaagaattttgatggtttcttttcaaataccctttacttaacttcgatgttttgtattcaaagtttcttgttttgatgcatgttttccctgcccaaaatcttccccagctaaagttttctatgctaatattgagaattgagtgttgatgggaaatggaaagtggaaaattcagcatgatggtaacagtattttcagtaactaatatactgaaatactaactagttgtgaaaaattattattatattttatacactaaaaggagacagaaaaaaccatcaaaagggtggggcttataatttgtttccttgtgtttaactgtcatggcggtggtatcttctagggggaaaaattggtggacactaatatttagttaacacctagagagagagaaagacataaaaaaagaggaatatatgtgtgtaattaataatatgacgtgataaagaaaaagttatataaaaataagaagtgttagatgaaatatacggttaggtaagagtgtatatattatcacatccattttcaactggctagtccattcaatattttaaaaggaacgactgaaacatacgtaagagttaaaattaaaattattgctttatgttggggcccggtcatcatcttttagatgtaactactagtatttaaggataaacatgtttggactttgacaagttaagtggattctagaataaataataagtggcatgtgggggcccaccttgctgtgaaattattggtaactttgtggtgtaaaagtgcaacaaaagaacaaacagttggaaacaagtatgaaaaaggagttaatttgtctttgaagtgttaaaggaaaatttcaagggtcatcagttaagaaagtgcagtttgaataagtagttaataatttaccatttattgttttgtgtttgttgatgtcacagattgaagcaccgtggtcctgactggagtgggctccaccaatatggtgataactatttggctcatcaacggttagccatagttgatccagcttctggtgatcaacccctcttcaatgaagacaaaactgttgttgttacggtgagccttgtgatattcaatgattaaaattagttttatagttattcgatcataagataatattttatatcaaatttgtgaatttttataataaatatcttaaaaattatattaatagtaacttttttattggttgatagtgtaaatatttttatcttcttaaccattaaactcgtgtaggataattattaaaaaatatccaaatttcacattaattgtcttaatcttatatatttgttggacaacttcgcttaaagttaattggttttaagataaatttaatcataatacttaagttgtaatatataaaactagaatgtatcccatagtaacatattcgatcttttttatgcttttatttactaatctcaccaatttcactgcgataaattatgactcatgttaaatatgatccactgaaaaccaggtgaatggagagatctacaatcatgaagaactcaggaaacaattgcctaatcacaccttccgtacaggaagtgattgtgatgttattgctcacctggttagttttctctatgtatattttgcaacaaattttaacctgatcatatatacataaaaaccagaagaaactttagaaactttgttttattcatcagttattcttattctaagttttgaccaaaatttccataatttttaatcatatagaatatggctgttacaaatgattggaattcctgttcttatcacttgtttcttgatggtgttattttagtatgaggagcacggagaaaactttatggacatgcttgatggtatattttcatttgttctgctggatactcgtgacaacagttttatagtggcacgggatgcaattggggtcacttccttgtacattggttggggtttagatggtaatgttctaacatgtgccctgtttttgaattgaattcatgtgttctatttgaactaaaacaacatatttgaattgaataaatggtgacaaagtttggcatattcttctgttcaggctctgtctggatttcctctgaattgaaggggttgaatgatgattgcgaacattttgagtcttttccacctggtcacttgtattctagcaaagagagagcgttccgcagatggtacaatcctccatggttctctgaggctattccatctgccccttatgatcctcttgctttgaggcatgcctttgagaaggtaagattcatacatgacacaacacatcattgtatttgaacgtttatccaaaaacacctacttttggaagccttggaaaagcttctttagaacttacttggacttacaaaagtagcttgtaaccttcttataaactcattttagcttatttcaaaaaggttcatcaagaagttatcaaaataagctattttaacttattctaacaagctttcaggtgataaacacgtattgaacaagtaattaattaagttgtttatccaaacgtgcactttaccacactctttttttttatcggcaaacattagttttgttagtagatgggatcgaacccgtgacctttcccctttttccttctcctttaatcatccaacccaccttatatctcctgctctttactacactatagctgatataagtgaatgttattgcaggctgtggtaaaaaggttgatgactgatgtgccctttggtgttttgctctctggaggtttggactcttcattggttgcagccgtcacggctcgctacctggcaggcacaaaagctgcgaagcaatggggaactaaattacactctttctgtgtaggccttgaggtgtgtatgtaactgttcttgaatttgcagtggatttgtttaatataagaagaacaccatgaaatttgtcttaatctttaatcatcttatgttgagtagggtgcacccgacctaaaggctgcaaaggaagtagcagagtacataggaactgtccatcatgaatttcactacactgttcaggtatatttacatgagatagtatttttactgctaaaaaatttgggggctttttgatgtacaacatcataattagtaaatgtttttatatatggtgtatgcaggatggcatagatgccatcgaagatgtgatctatcacattgagacatatgatgtgacaacaattagagcaagcattcccatgtttcttatgtctcgtaagatcaagtcattgggagtcaaaatggttatctctggagaaggatctgatgaaatctttggagggtatctatatttccacaaggcacccaacaaagaagagtttcaccaagaaacatgccgcaaggtcatacagttatcatgtttcttatcagaacaatataagtaaatggactgttaaggaaaagggttaatagatgctttcttttttctcttgaatatagattaaagcactccacaaatatgattgcttgcgagccaataaatcgacctttgcctggggtctagaagccagagtaccatttttggacaaagagtttatcagagttgcaatgaacattgatcctgagtgtaaaatggtatggatacagaatattgcaatgcaccatcacttaaaaaatgttacattttattaaagtggtttactacgtaatctgttcagataaaaaaggaagaagggcgaattgagaaatgggcactgaggagggcctttgatgatgaagaacatccttatctgccaaaggtactatgtgatttgaagcattgtagaactttgcaaaattaatttgttaaactaacatgttagactttaatttttatgcagcacattttatataggcagaaagaacaattcagtgatggagttggctatggttggattgatggccttaaagctcatgctgagaaacatgtaaaacttgaatgaaaccttttctcgctaatctctttttttttttttttttttctcttgttatcaatggtcaggcatgacatttcatattgttaattattggtttatgaaaatttcctttaggtaactgacagaatgatgctcaatgctgccaacattttccccttcaacactccaaccaccaaagaagcataccactatagaatgatatttgagaggttcttccctcaggtaattttagtcaatcatacctagatatgaaaataattcatgtcgatttaacaagggctgatccaaatctctgtgccccttaatttggttttgtagaactcagcaaggctcactgttcctggaggaccaagtgttgcatgtagcacagcaaaagctgttgagtgggatgctgcttggtctaacaaccttgatccatcaggtagagcagcacttggagtgcatgcatcagcttatggaaaccaggtcaaagctgtagaaccagagaagatcatacccaagatggaagtttctccactaggagttgccatatagagcttgtatgagccatagcaaggactagtagttgccctagaaccagcatataatattattatactagtcatcataaaatgaaaattttgcttgctttgtagtttatccagggaatggtatataaatagataaggctctctatctagctgtcttaagtgttgtgccatccacatcttgtctttattttctatttatgtcacctgaacactatcataatgtactggatttccaagaaaatgttatcagttaaatttgaatgcatggttcactatttcaaattttcgttacctgtgtattaccaaaaattctaactagctgaactgaaagcatattattcatgccatacatttcaaaaaataaaaaggaaagtgacacagtaagtattatgatttatatgctaacttctacaaatgattgtagaacttcttattaaccttacaaaaaaggccaacacaaagaacgtatgttcaaaataggccttaatataggcagatattagggaatgattgattgataaagagactaaccaagcccactcaatagtacggaacacttctgacgtgtatctctcaaatttataattctgattagactgtttatagtgattttttttcgtgaaaaaatattaaccttttatttggtcgagggaaaagaaaatgaaatgagaaacaaacttaaaatttgaataaaaatcaaatgaagaaaaaattgaaaattattttattaattattttttctttctttgcttagtttttttttattccttcttatttgtttttctttgtgcaaatattggatacaagagcaatgattatagacataatttaaagtatctatccaaacataggatatgagagtaatggtgttgcaactaggttagtgctttctacatggtctgtgaggggtgccttggtatcaaatttcataattcgtgggtgctcattgttaacgtattgggggttacattacgatgttttgggtctggaatagtattatgtaccggttcctgctatttacacctctatttttcctaaatacaccccatgctcccttctactaaagaagttcacctcttttacttttgaaaaatatcttttcagaattacatataccaatttcaaaaatatatctccagaactatgattcatggttccagagatatactttcggaataagtatatattttttttaataaaatatcacttaagaattaagatggttgatgaaacaaatgataaatgcttatcttatattcatgtttgttagtcttatttttat

SEQ ID NO: 360 - DNA, 6117 bp, Glycine max
tataatattgaatatattacataacatatatggagaaagaaatagaggttatcttactccattaattctggtccctctctgaataagataagagacataataatattatcatcttatataatatatttcaatatgataatacagttattttatcttatttttttatatttttgtcatcaaaggtatccttatgattattcaaatatcagttggatcttataatttcatgtaagtaaatttaaagagaccgaatcaataaaaaaattaaaattatgttgcaaaattgaaaacgaacaatattttaaaaatcattttataaattttaataaatacgacaccaaattacaatctaaaataaaattaagatattataaaggagtaatattatcctaaaaataacataaatcttattaattatattctcatcagagtcataaagatgatttgggaagaggcataagcataagcgttggagtgatgataagaaggttataggttctaattcttgtactaatataacatactagtagtaattattaacgtttacttataaaaaaaaattaaattcccttcgtatgcatggtaagtatcattatttgcatggggccttaatgacacttgcacttgacgtcaaaatgtcaaatctaccatcaaatacacattcattattcaccgtgtaatgtgtacagatgtcttttgttccttctgcatggaaaaagtgtgacaccttgcattttcagtactcgtgctcatcgttaccagcaatatagtattttttttttttagtgaaccagcaatatatatagtatatcttatagaatattacatatactttaatacttaggtgaaaaaattcttaacttatatatatcatttaattacatcattaaaatgttaataaaatatagtcagtaagtaattaatcgtcaacacaattaagttgagaatagctatcattataaatacccatgatagctttggttgattttctcacaggtcacaggctttttctttttcttcttcttcttcttctttattttctcattttgccaaactaaaatagttgtgttggtagctttggcaaagatgttttcagcaggccataagatcaaagggacagtggtgttgatgcccaagaatgagttggaagttaaccctgatggctcagcagttgacaaccttaatgctttcttgggccgtagtgtctcccttcagctcattagtgctaccaaggctgatggttaattaatttcttcatcgtttcacttttttccatcatcatcatccacaatcatcactttctatattaaaaattaactttaatttctatatacgaaaagtaagtgtaaagagtttaaataatttttgtaaaatagtaatttctgattcaacgatagtatacacattttttacatttttaattcatagagggttttgttttctattagaaatatatcacgtagtaatacataaccaaagatatttatatagtttaaacttactcggtacgtacgtaacatagtattattattatgtgtgtatgatctgtttgtagcacatggaaaaggaaaagttggaaaggatacgttcttggaagggattaatacttcgttaccaactttgggagcaggagagtctgcattcaatattcattttgaatgggacggaagcatgggaatccccggtgcgttttacataaagaactacatgcaagttgagttcttcctcaagagtttgactcttgaagccatttcaaaccaaggaaccatccgctttgtttgcaactcatgggtttataacactaaactttacaaaagcgtgcgcattttctttgccaaccatgtaagctctttagcaattagtagtttaattacaaaagtgtgtgtgtgtgtgaaatgtctaatggcaagttcttcaagtttaagctaagaattaaaaaattcaatttaatgtaatgtagacatatgtacctagtgagacaccagcaccacttgtggagtacagagaagaagaattgaagagtttaagaggaaatggaacgggagagcgcaaggaatatgataggatctatgattatgatgtctacaatgatttgggcaacccagataagagtgaaaagttagctcgtccagttcttggagggtctagcacctttccctaccctcgtaggggaagaactggtcgaggtccaacagttacaggttagtcttctatggttctatataatttaaatgaattgtaacattgactttttataatgttatggtcagcgtagtacaacatattgcttgggtatatgtgacacgttataaattaattttgcactatgattctgattatttttattttttttggatgattaagtttttacacattgttgtttcctaatcaatttcaattcaacagacccgaatactgagaaacaaggcgaagtattttatgttccaagagatgaaaatttaggtcacttgaagtctaaggatgctcttgagattggaacaaaatctttatctcaaattgtccagccggcgttcgaatctgcgttcgatttgaaatccacgccaattgagtttcatagcttccaagatgtgcatgacttgtatgaaggtggaattaagcttcctagagatgtaattagcacaattatccccttaccagtgatcaaagaactctatcgtaccgatggtcaacacatcctcaagtttccacaacctcacgtcgttcaaggtgtgataaataaatataataaaccactcatacttgaaatcttgaattaatcaatgacataataaatataataaaccactgatacttgaaatcttgaattaattaatgacattttggtcatacaaatcgtatcgtattcacgaacaaattcaaaactcattatgttttttatgaaatggttattccatttaataaggattttctttttattattaatttgggtagtgagtcagtctgcatggatgactgatgaagaatttgctagagagatgattgctggtgtaaatccctgcgtaattcgtggtcttgaagtaagttcaaatatttatttataaaatcaaatttgatgtccacgtaaaattaggtagtatatcgccagtaataaactaaaatactaaatggttgttcttctttaattaaatggattgtaggagttccctccaaaaagtaatctggatcctgcaatctatggtgatcaaagcagtaagataacagcagattcccttgatctagatgggtacacaatggacgaggtaaacatgcgaagcgaaggaattgatacaataattttcctcttaaagtaattaattaaaactaattgaattttgtggtacaggcacttggtagtcgaaggttatttatgttagattaccatgatatcttcatgccatatgtgaggcagataaatcagctgaattctgccaagacttatgcgacaaggactatcctttttttgagagaagatggaactttaaagccagtggccatcgaattaagtttgccacattctgctggggatctgtcagctgccgtcagtcaagtcgtcttacctgctaaggaaggtgttgagagcacaatttggctactagccaaagcttatgtcatcgtaaatgactcttgctaccatcaactcatgagccattggtataaattttcattttcattttcattgctatatatcaacatatatagataaattcaatctctaatccctctctctcaagtgtatattaattacttttgatttcttcataggttaaatactcatgcggcgatggagccattcgtcatagcaacacaccgacatcttagcgtgcttcacccaatttacaagcttctgactcctcactatcgtaacaacatgaacatcaacgcacttgccaggcaatctctaattaatgctaatggcataatagagacaacctttttgccctcaaagtattctgtggagatgtcttcggcggtttataagaattgggttttcactgatcaagcactacctgcagatcttatcaagaggtaattaattaagtaaatctctctatatcactagaaaaaaaatgtgacataaaggtttgaaatatataggtatacattttgttacaaagcataatgatggatgcatgtatatattatattttgtttgacttagaggagtggcaattaaggatccatcaaccccacatggagttcgtcttctgatagaggactatccttatgccgctgatggactggagatatgggctgcaattaagacatgggttcaagaatatgtgcccttgtactatgcaagagatgatgatgtcaaaaatgattctgaactccaacattggtggaaagaagctgtagagaaaggccatggtgatttgaaagacaagcatggtggcctaagttgcagacacttgaagaccttgttgaagtttgcctcattatcatatggattgcttcagctctccatgcagccgttaattttggtcagtatccttatggaggtttgataatgaaccgcccaactgcttctagaaggttgcttcctgagaaaggcaccccagaatatgaagaaatgattaataaccatgaaaaggcttatttgagaacaattacatcaaagttgccgactctcattagcctttcagtgatagagatcttgtcgacacatgcttctgatgaggtctaccttggccagagggacaacccacattggacctctgattcaaaagcattacaagcctttcaaaagtttggaaacaagctcaaggaaattgaggaaaaacttgtgaggaggaacaatgatccgagtctgcagggcaatcgacttggcccggttcaactgccatacactttgctttatcctagcagtgaggaagggttaacttttaggggaattccaaatagcatctctatctaagggagcctgtggtttactctaattactctatatatagtgcatgtgtaccttccaataaaaaagatgcaagactagagatccgataaatcttgcatcttatctaatgtttcaattatcttgtgttttaattaatgttgtaattgagctcacagtttggttgtggtttgcaaataataagagcagtgagcactattagtttgtgtttagctcctgtcatcatgtttggtattatacattttgcagattacgtaacacaaatttatgttattagtaaaaaaactgtattgtacgaatattttgtattataagtatataagaaataaaaattattagtattagtaaaaaaactgtattaattctttgtagttcgtctcattagtttttgtatcttgttatatttgtttctccattgtttttatcatcactatctaatttatctgctacaaattacttttaagtcacaactcgattcacatgcatgggcgctgcaaaattagcacacagtaaaaatctatcaataagaaaaaaaataccttacacgtttggcatggaatttattttgcttttagagtgtgttatctacagagaagaaaacaatttatcacatattacaggtgaaaggcctaaggctttcaacttttaatgagcacgccaataaaaaaatatgatagatgtatccaaatattctcacagtatgatctgtttgaaagccacaaatttgtaacctttaatgaatggaagcctgaaagaagaacgaccacaaccgatgtcaacagatgaaatcgagaacgcaaaaaggacaggtgtgtaccatcttagttaaagaagacgagcaaaggcagcagtggatgtacttgatcaataagtaaagccctacaaggctcagagcagaactaccaacgactagaaaaagtaacatgtgttgtggtcatataacagcttgtggactagaatttcctatactgccctgacttggcaggaaaaatgatatcttggatacatggccaatgcaattttaaaaactaacccttgctgcaattgaaattgcgactcagataagatgatattttcttctagtttgcacttcacagcagcattgttaaaagttaaaacatgcatgattgcatttattattttggtttccattatactaacacaactctctttattaatgacaaatacaaatacattcagccactcca

SEQ ID NO: 361 - DNA, 8211 bp, Glycine max
aattattgttattaattttatgctatttattgaaaaaagttaaactatttatttggtatttgtaattattctcattttatattttagtcctatgaaaaaaatgtaagttgtagtctctacccacgaataaaagttttgttccttattacttaaacttgtagtacaaatatgttgcaaaaacttttcgacaatgataaattgtcactaaaatttacaatctcctcatgtaatcacatgaatttgactcgtaaaaagccatgaaattaaaatgaaaacagccataaagatcaagtgattttttttattaaatgacattaaaaatttggtaaaaaaaatgacattgtaaatatgtattatttattctaactctgtgacttatgtgtaccaatttgagtaattatttatgtaagagacaaggagtcctttgtttgtttttattccttttgtattaaaataatttatattttcaatagacttatttctccaaatatttaagtatccaaaacttaaactcgaaataactatctaagttaacaagtcgtttagtcatcactgataatgataaaataaaacatgataacataaatataaaaaattacattttatttaaatagttacttttcataaattataaaaaaattgtataagatttttaaaattataattattattcaaatattttttctttaagaaaatatgaagagacatattccaaattgcagtaattcattgatgaagtccaaggaataatgaattgctagaattttacactgatcatatatataaaaattaacgttccttcaggaacatccgataaaattggaacggtatataaaaattaacctcaaataatattaaaggccataaaattataattttaattaagaaaataccagaaaaaaaatatgcaagtgttttgtggttatgaaaggatgggtatagaattgtggagtggattctacaaaacggacaaaatgtgcatttaaacgaattagtatagaaaacaaataatgcaactgccacccaaaccgtgagtgcaaaatctaccaatctcaaacagtgcaaaaacactgcgaaatattttcaaccgcaaaacaaataacattcaatttccaaaattgccataatcaaccatagctgaacagaagaagtcagtaaccatcgtcgtgagcgaagatccataataatacagttacaaattgcaataacacactcattgtggttatcgaaatttgatcgcagcgtcgagaagaatgggaagtttgggagcgattctgaaacatccagatgacttttaccctctgctgaagctgaaaatggcggcgaggaacgccgagaagcagatcccgccggagccgcactgggcgttctgctacacaatgctccacaaggtttctcgaagtttcgccctcgtcattcagcaactcggcaccgagcttcgcaacgccgttagtccctcgcatttcccgttctgcctacaccgttctttccttatgctttcgattccacgtttttcttaattgacctctgtttttttttttttttttgcaggtttgcatattttatttggttctgcgagctctcgacaccgttggtttgtattcgtatcttcgatttaaagccttgcgcgctttgttactttgtgctgcatagcttgcgatgatgaatgatggatatcggttttaattaactacgctgtgttgaccagtggtttttcggtgtttaattttgacttctttatttatttgttgttttttaagcgttgaatgttgctgtgtagggattgatgttatcgtcgtacggctttgggaaataaaagtgattttaagcttcagctctttgaaaaagcttttgaaaatgaaattcaatagaaaagcagtaacacgagtttttttttttcttgttctaaaaaacataattattatggaaggcatgcaaaattggcttacactgaaactattccaagtctctataaatctgctggttattgtgtctattgtctttgaaagatttatgtttaaaccttaaaattattctattgagcaactattcttttcttcagaaattaaaaggctatttatattgttgtaatttttttttccttttgacagaggatgatactagcatagaaacagatgtcaaggtgccaatactgatagcctttcaccgtcatatttatgatcgtgattggcacttttcatgtgagtgtgtcattcttttttgcttttctttttttaaataatttcttgccaagataataagattcaatacaatttgaataaacttcttcaatctgttgtttttttagttgtaagtattcaatctaaccacatctagcttgtttttcagaaattggattggattttaaactacatactcatagcaattgcttgatgctgatctgcacactaattgtttctaatgtgactaggtggcacaaaggagtacaaagttctaatggaccagtttcatcatgtttcaactgcttttctggaacttggaaagaagtcagtttttatccttgcacatttacctaaattgaactttaatattctgtaccatatatggtctcaagttgctgtttgtttccatccttgatccaatcagcagcagccatttgggttttattattattgcttattaatcttggggaagaggagagggaggggggtgtactgtttatcattaagacatgttactaatatcattttgtgagattcaatttgttatccctttctgtctggaatattaaaatttggatacgggattgtagtggcatgttgttggtgtggaggttgtcaacgtcatgcaccttttaatgtaattatttattatgttgataattgactgcagattatcaataactatggtcctttgtgtttgtgatggctgtgcattctataacaaaaaattaaatgttggtcaatgatttttgcagctaccaggaagcaattgaggacattaccaaaagaatgggtgctggaatggccaaatttatttgcaaggaggtttgtcgcacatggcttctgttctccatatattcttttcattaacttagttgtagttaataaacctctgtgactgacaagagattatatagagttcgttattcgtttaaatgatgtctccatcttctagtttctggtctctattgtttttttaaatgatttttcttgcttcagactatcttattcaggtagatgaaaatttaggaagaaggggcaatataatgaagagaaaacaaatagtttagtagttttatttcaaccaacaattccttaatcatttgatgttatattattattattatcagtgcatctctcctaaattcttatttacagagcactatgctgcgaagggatttctgcattgtcttgatttatgacaagagttttttttttgcaggtagaaacaattgatgactatgatgaatattgtcactatgtggcgggacttgttgggctgggtttatcaaagcttttccatgcgtctggttcagaagatctggctccagatgacctttccaattcaatgggcttgtttctacaggtatcatatcgtggtagtaagtaataaaaaatacagtatggttgcaattgtttacttacatttcaggtcaccctttgagattgcagaaaacaaacattattcgagattatctggaagacatcaatgagatccccaagtcacgcatgttttggccacgacagatttggagtgaatatgttaacaaacttgaggtttgactctatacgataggaatttatatttaacctcattttgttatgaagttagaaaatcaattcctgcattttccaatgaaaaatacacgtcccaaggcaaataattaaacagttgtgtgacaatattcaacagttttgttcagattaatttaagcatacagttcaattgtattcaacagtttaaaatcaattctattaaaggggtacttactctaacataaataattctttcacctctttctcccccatttcattaatctcacactaatttcttatcatttgaatatttgatggtgtgatagtgaaacctgtcacactttttttacacacatgaatactttttaattttttgtgtccaggatttgaaatatgaggagaactctgttaaggcagtgcaatgcttaaatgacatggtcactaatgctctgatgcatgctgaagattgcttaaaatacatggctgctttacgtgacccgcctatatttcgcttttgtgctataccccaggtgctgttcttttaattacttctgattatactgttattatgttcatttcaatcgtcttgcaatgatataccatcatttatctgcattttttattgtttgcatatcatgttatgttacagtagagttgaatcattggcagcttcctattcagttcaaataataataataaaaaattactatgttctgtcagtttctttaaagtttagtttaacactgcccaaaagatgtgtgaaaataacacacttttatacaaatctttataaagtgctttgcagaaacatagtggtaaaccttgagacaggatatttttaattgtaatttcatgtacaataaatgcaagagtagatcttcttcctatggttgagcaattttctagattattagtgtctgaaggtttagctaaataaccttgctgattttagttaatattacctggaataagaaaaattttctttcgagctgcagatgttctagaggaagaagttgcatgggtcttgggcctacaatttacatttaaagaagttaaagtaccttgtggtggatttaatagtttcaatctgatgtggaaacaattttttttctttatacatcacagttgttttgtgggggtggggttagttctagctcatattcattttatgtttaatgatttatgtatatagcaatagttattttcataattttttcccagtaactttgatgtttatttgacatatgcggtgacagataatggcaattggaacacttgcattatgctacaacaacattgaggtcttcagaggtgtagttaaaatgaggcgaggtaacagcaaatattctgataataatttccttgtgatttgattttgaggcatgctaaacataaagtcaaaattggtataagtcacggcatatgtgtctttgaagtcctaggaatagtgaattgctgcaatttggatttcatgttttttttggcacagcatttgtatttcatgcttgaatcaatctctttaaaattacctttgaatctgtttgttattatggaatccacatatgcattagtgtcaaacataacttttgtatgggcccaacacgaagtcattgagcatattccatgagattctgtgattgtatcttggatgttcaaatatcaaatctaaataaatactttgcaactattactaccccacatcttctgtagcattctcctcttatggatgttggttaagtactgaatggcagtttgaacttaggaagagtggccgatggcatatacttttgagttaagaggccagcagatgcaattctatgatggatatcccttgttttgaagtgaactgataataccttaacctagatatatatgactagctgagtcatttgaacaatttcctttcctcccattttgtttgacaaaatattgttttttttttctgggaataaaaaaggatcaacatgtagctattggtgttcatgtttgttgtctgctgttactctgtgtgtgtgttgtgtgtaaatattaaactagctgttatttctgccttttgttttcacttttcaatttataggtttaactgccaaagtgattgaccgaacaaagactatggctgatgtctacggtgctttttttgattttgcttctatgttggagcccaaggtatgaatctgttgttgtccttaacacggtatgattaggttttcaactgaagaatgtgagtgctactcatgttgcattttacattggataaagttcctaattcctattgaatgtttataacagcaaacacattaattttacattggataatgttggtacttcctactcattccattgtcctaaaggaaaagatatttttgagtatccaaaattttaaaatgtagatcttgttgcagtttttcttttccctttagttgtagtacattccatccaccatggaactaaagcagtttttcagtttcaagagtatcttttaaaagctgacttttcccaactaaaaagattcagtattttcctttgtaggttgacaaaaacgatcccaatgcaacaaaaacattgagcaggctggaagctatacagaaaacttgcagagaatctggtctcttaagtaaaaggtatgcacataactgagtagcttcaaaagtactttatctttttatcattgacagtctaacaaccctttcattgatttaagcaggaaatcttacattgtgaatgatgaaagtggatatggctcaaccatggtacgtttttgttgttttttttttttggctgaaattagtctttgttgtctagtaatagtgttaaccaatgacgcaacagtgacaagggcagccacatgtaaattttttttgttaaactgtgtttttaaaatcattatctgtgcaaaacagttgatgagagatttaaaaacacaatttatataaaataaataaattatacatgactgttatgctattacatcattttaactagatgctgcatttctgacttctaagaatatgcactgacgtaaactatccttgcagattgtcatattggtcatcatggtttccatcatttttgcttatctgtctgctaaccaccataatagctagtgtaagttctgttgttaattttaatgtacggttgaaattgtaagaacaattatccttatctataaaattgttcactcctttttttgttgcaactaaccatgccttcttgccttttgcgatcatggatagtagtgaaacactgatagcacgcctcgttcatggaatgcgaatttgcatgcatgcaagcaatagtatgatggctgcagttgactatcgtgtattttaattgaaaaatagtcgaatatagcgtcaagagcttcttgtgttagtttggatttaactctatcctacgttcatcccgaaaattatcattattatgtgtgttataagttgattgtattaacatttcacggataaagttggaataccagatgagtggtaccagtgatgccccctccccttttttccccgctttgttcaagttctttagcgtggcatgccaaaatcattcacaagaaggaatcaagaaaggttaaagaggacggaaagagacaaagaagttaaggtttttaatctgataatatacacaggaaattattgggatcgacatttgtccttgaaaattcataatcgtcgaatgtacacaatccatccattgtgatacaaccgttgaatcacaggtttttaaaaaatactattaaatgccaattactggtccagcttcgatgaccattttaaaatgggtataaattagtattactttgagcatttacaataagagtttcttaatggattacttaataaaaataattattattcatgagttgtttaattttatattaaatataggagagaaaaataaaatatttaaataatttgttaatagaaatacgtattggagaaaaaattgagttacttaatattgaatattaaggttatatcaattaagttgcttatatcaacatcaatgtattaatatttgaattgaagacatcgattaaatattcttttcacttaacagtgtcatatttatgcttcgaactcttcatattttatacaaatgttagtttgtaattcaacatatttttttgataatttaatgtgaatccaaaatcacatcaaaatgctcttaccaactaatataatttttggtaaatgttcatatatttgagttaaaacaattgattgtagtttattaattgagttaaaacaattttaagtaactttttaatctaaaattgattgacttaaaacaattttaagcagcttttaattgaataaaaaatttatattgaattttactactaacttttacaataaataaaaattcaaatatcaataatttcacttgaaaatcattttacaaacgatcacccgaacataagttagttggttgaagttgcataaacaaactacgaaagaaacaagttgagtgcaataaaataaaa

SEQ ID NO: 362 - DNA, 4389 bp, Glycine max
tttttcaggatcacgtattataattttatggactaatttgactatctatctataaaaaatatagtacatggaaagaagccgatcatccatttgcatttcaagaattgcgaggaataatctagaaaataaagtacaactgattaaaaaccgggataaaattaagtatgtgtatattaaattttgaaattaattttaaaattaatcatcaactttttaacagtttaattatgtaaaagtttgatactatatagcaattaataagaaactatcattgatatagtacatgtttacaaaattactcctgtaccgtacgatggagcattgccttcacactctcaattcgtgacccggtaacaaattagaaactattgctatatatgctccaataatctgtccacttatcaagaaataagagtcattattaatacagatataaagaaacaatagtataaaatagtaaccctttaaaattacttttggagaattgtttactcctagttattatcttaaaaaaattgaatcatataattatatattaagttttgaatatgtgtttccatcttatagtttatgagattaccatgtgtttaacagattgggatctacaaactttaaaagtaagcagtagatacataatagttttataggcctggttggttagctgaaatttacagctactacgcggataatgaaccccaatgatgaaaacatgcagacgcatgttgcagcatggaagtattttatttaataagaataataataaggtaagtggtagtaattaaattccatattcagtatcatgggaaatgagattctttgcctttgggatacaccattaggcttttagccgttccactgtgtatatgcggcgaaatgcattactccatggcccttgggaatccacttgcctcctatcagactcttacgtagtcaacgccttcgcctactataaaaacacatgcactaccacactccttccttataccattcactacaccaacacactttcttccttaattttctagctcttgctacgtacttgaattcaattagttattaatggctgagattgagggttctcccggaagctccatgcatggagtaacaggaagagaacaaacatttgtagcctcagttgcttctccaattgtccctacagacaccacagccaaatttgctctcccagtggattcagaacacaaggccaaggttttcaaactcttctccctggccaatccccacatgagaaccttccacctttcttggatctccttcttcacctgcttcgtctcgacattcgcagcagcacctcttgtgcccatcatccgcgacaaccttaacctcaccaaaagcgacattggaaacgccggggttgcttctgtctccggaagcatcttctcaaggctcgcaatgggtgcagtctgtgacatgttgggtccacgctatggctgcgccttcctcatcatgctttcggcccctacggtgttctgcatgtcctttgtgaaagatgctgcggggtacatagcggttcggttcttgattgggttctcgttggcgacgtttgtgtcgtgccagtactggatgagcacgatgttcaacagtaagattatagggcttgcgaatgggactgctgcggggtgggggaacatgggtggtggagccactcagctcataatgcctttggtgtatgagcttatcagaagagctggggctactcccttcactgcttggaggattgccttctttgttccgggtttcatgcatgtcatcatggggattcttgtcctcactctaggccaggacttgcctgatggaaacctcggggccttgcggaagaagggtgatgtagctaaagacaagttttccaaggttagtcatctcttattctttatctatatattaattctttcagaacatagataatatgtttgaaaaaaatttatgtaatcatgttataaaataattttatcctatcatttaatcaccatatatatatatatatatatatcatttttgatgaattaattgactttttacaataaatatcttaaaaatcatattaataatgatttttaattaaaaaatagtttaaaatgaatttattttattagtatgattactgaattctaatatgtgagtgattgaatgatatttacagtatgagtcttatttatatgtttgacttttccattagtggtgaattttagtggagaaaacaaatcttaaactatgtaacggatttcacttttttgttcaggtgctatggtatgccataacaaattacaggacatggatttttgctctcctctatgggtactccatgggagttgaattaacaactgacaatgtcattgctgagtatttctatgacaggttagttcagctcaaaggcatcacaattatttgcatatatcacaattgcattaatttaataactctattactacacattggtgtttttaaccttacataatgagttaattgatacaaaacagatttaatctcaagctacacactgctggaatcattgctgcttcatttggaatggcaaacttagttgctcgaccttttggtggatatgcttcagatgttgcagccaggctgtttggcatgaggggaagactctggaccctttggatcctccaaaccttaggaggggttttctgtatttggcttggccgtgccaattctcttcctattgctgtattggccatgatcctgttctctataggagctcaagctgcatgtggtgcaacttttggcatcattcctttcatctcaagaaggtctttggggatcatatcaggtctaactggtgcaggtggaaactttgggtctggcctcacccaattggtcttcttttcaacctccaaattctctactgccacaggtctctccttgatgggtgtaatgatagtggcttgcactctaccagtgagtgttgttcacttcccacagtggggtagcatgtttctaccaccctcaaaagatgtcagcaaatccactgaagaattctattacacctctgaatggaatgaggaagagaagcagaagggtttgcaccagcaaagtctcaaatttgctgagaatagccgatctgagagaggaaagcgagtggcttcagcaccaacacctccaaatgcaactcccactcatgtctagccatagcacttcaatcaaagaagatcatgaaacataattactgagcagtattgggaatgaagaaccatgagtgaagaattttctaataagaaatcttgtaacatgtagacatagaatgttctggttctggtttgcgtgtggtgtaagagttgtctacttgtggtaagtcataagtatcataatcagtatgtcaatgcagatcttgatgctgagtatcaatagtatcagtttagttaatttgatttaaaatcaattttaccattgctggttgtgtttaattatccagtaattaggaccttttatttgactttctggcttactatatggttgtctacttgtggcaagtcataagtatcataatcagaatgttctggtttgtatattctgtacttgaaatggaatcagaaatgaaattgatattgtactctttgcaagttgcaactcaattattgttgagttttttttaagagaaattgacctgtctcatttcgtgaagcatagaacataccaagaagtatataataatctgataaacgaccaagcagatactaacgcaaggtaatgccaaaaattagatgaattaaataattttaaattctcttacaacatgttatcatatcatatgaatttacctggttttggttccgtgtggattgcgaaacagaactataacatagatattatatatttattcacgtaaggagtgactcatctttcgcgttggctcaggaaaaaagaatggtggccaactaaccattgtgttgtttgctatacgctacttcctgtttcattcaatttcccaagttttttggacggcaaaaacaactacgcttttgacggtgttgagaggaagacattacaagtagaaattgtgggctactacgtcaccagatgcattattctcagatttttatatttcttttaatctcttacttttttcactgtatcattcctcacatttttttatatatatttatctctgccttctatcaatcttacatataaaagattatgtgagataaacactgttgtttttatttaaatagaaaagacaaacacatttgcagaccaacaagtgatcagtttgaatggagtatgactcaagttctgattttgtgaataaaaaaaataaaatgtcacaaaaaaatgaccagttaaattctcctatatggagattatttatttattaaacttgtaaatgcattacaccaagtcactactaaattg

SEQ ID NO: 363 - DNA, 6338 bp, Glycine max
aaataatctaatatgataatttaaattatttattattaattttatcctatgtaatgaatgtattaaaataatgtaattataaagctaaaattgaaatcttttaaataaatgcttagtattaagtcttgtaaataaaaaatataattaaaaaattataataaaaataatcagttaaatttttgacaaaaataaaattaacaaattcaataaatattcaaccatttacacctgtattattgcaaaaagaaaagaagaaaaaaaaaacactgaatccaacgtgtcagttacccggtgaatgagtattaatggacccaccatcgtagattcttctcccaaacaattccaaacacatttttgaaacgcagctgccaattgaaaaatttattatattatttaacaattccacctaatatcatggttattcttgtgatttaatttttataacttattatgaaaaaacaaagcattaaatgttatccgttgattgtaacagtaagacttcaatgattatgtacggaaaaatgattttatattataagttaattaaaaattatatttattttaattttgacataattattataaaaattaataaattattttatatgaaagatttgtaataaatgattatataaaattattttatattattaatatataatttttttattaaaattaaagtcaacatatttatgatgaattatttagaatgattggtaagatattttatgatgtgaatgtataattttttttatctcgttgttttctaaattgtcctttatttattatattttaattgtttttcaaaatccattattttaattcgcatttggattttgtcattttttttaacaaataaaaaatatttgacttattattattgagttactaaaggaagaaaacattaaaataagttaatattcaatatagaaatgatttgattggaaaaaaaaaaaactattggtatagtcaattacgtattgaatctgaggagtagaatttggtagggagagaacaaacccactataaaatgcccacacccctgcctcgctgttctcacatcttcttttacgtattgaatctcagaattctctaaaagagatctttttctgctctttgaagaaagaagggtctttgcttgattttggagatgtctctgctctcagatctcatcaaccttaacctctccgataccaccgagaaggtgatcgcagagtacatatggttagtctcttttctctctctgtttctctctgtctcacaaagtttttttttggttctgtacgaacaccaacataacaacctgggaaaatgtttatgtttgtgtctgttagtgtgtacatggtttttttacgtgtgcaggaacttttttttttctgggatgaaaaaaaatgcttttttttcttctcatgttgggtgtggtttatttttactaatcttttatttgatcactgacactaagttgggtctaacggaagacattagtctgtttctctcgttacatgaacagatcaaagtttccaatttttctgatggaaaaatgctgaagttttagtctttcccacttgagaggaaccaaagaaataaaatttttatttgatccatcactccactctactctattctactacttgcttttgttccaccccttttaaaatgaccctagagaagtttgatctctgagttctgaattcatgatatatctcattaacttgagtattgcaggaattgaaattactttttcttctatgatttcccctgtttttttcttttcttttttgcgggtgttccattttttgtgtgtttatgagatgtattttattctctctcgatttctcagcctcctttttgattttttttggggtcgttccgcttttgaagtgttaaatctataagaatgtttcctctgttttgactttgtcttttggtggttatgctatttgatcacttcaaagatgagtttgcttggaattaatttgagaaaggaagattctttttccatgtttctttcttgttgcttgttacttagtttcttgcttttataaaatacaacctaaattattcttcatgctcactatcaaatgaaagcaacttgttagaccatattttttcggataaaatttttcccttttgatgcattctaacatttttattattcaccatggtaggatcggtggatcaggaatggacctgaggagcaaagcaagggtaattcactttttttttttgtagcaaactataaaaataaaataagttcattcgtttttctgtttaactaatgcaagtgtaaaaattttcttggcatatagactctcccaggaccagttagcgacccttcagagcttcccaagtggaactatgatggttccagcacaggtcaagctcctggtgaagacagtgaagtgattttatagtatggtttttttaatcctatctaatcactatatctcccccttaaatacaaatttgtatttttttctttccattttatttatattccattatttacttatatgggattgattcaatacagcccacaagccattttcagggatccattcagaaggggtaacaatatcttggtgagtttggttttttgcttttacaactttgttttcctaaaaagtttacaatactcacaccactgagctagatccccttgttttttttttttttgtttatacacttacaatgtgtaaagattacaccaacatgatttttaaagtaattattataaaaatcaacaattaaattatttatattggttaaaaaaaatctttgatgcctacaactttgatttattctaggttatctgtgatgcctacactcctgctggagaacctattcccactaacaagaggcacgctgctgccaaggttttcagccatcctgatgttgttgctgaagtgccatggtatctattgttgtttcattgctgtttgaaataacattttctcactagttttcatttctctgaccaattggtgcatggttttttattaggtacggtattgaacaagaatacaccttgttgcagaaagatatccaatggcctcttgggtggcctgttggtggtttccctggacctcaggtgaatactaactttcattaatgttttaatttttagggttgttactttacacatatgaagctcatatattgtccatttgactcatttaactcaaattatcaatttttacacttattgggactcttatagagacaatgattataatcccttagcaatatcaaaactttgtctttaaccctacttctataaagtttgttggaacccaatttaagcttgcctttgagtgtcttttattgaaaaaatcatattgtttacttattactattagcttatagtacagctgttctacattttatatttaggaacaacattgttgttttgtttgttccaacagggtccatactactgtggtgttggcgctgacaaggcttttggccgtgacattgttgacgcacactacaaagcctgtatttatgctggcatcaacatcagtggaattaatggagaagtgatgcccggtcaggtaatttggaaagaaaaataatattatgcacttattttcgttctaatcgttgattacccttttagtattttcatttattgtttggtgcaaaatatatttcaattaaatctcatctatgattttgtataatacactataacttgcttttttataaaaaaaaaaagaatgaagatagtattaaatttaattcaatgtgtatgtagtgggaattccaagttggaccttcagttggaatctcagctggtgatgagatttgggcagctcgttacatcttggaggtaggtagcacatgatgacttactagtgttaatgtacctatcttaacattgcaactaacattctttgtttttctatggtaacaaacagaggatcactgagattgctggtgtggtggtttcctttgaccccaagccaattaaggttattttttttttctctctcaagttttctcccctttatggtaaagttattttcccatcacatttgttccaaccccatgaaaaaacataggtattttaggcattttatttgttcaaatgatgttgactattgttgtttgggtcattacaaaattagggtgattggaatggtgctggtgctcacacaaactacaggtaaccttttttcacttgaccaaaaggactaaactaagataaattctctttgcttttcatgcttgaccagtgcatactattaatataatgttgcagcaccaagtccatgagagaagatggtggctatgaagtgatcaaagcagcaattgacaagttggggaagaagcacaaggagcacattgctgcttatggagaaggcaacgaacgtcgtttgacaggacgccacgaaaccgctgacatcaacaccttcttatgggtaagaaacaaaaataaaaatgaccaaacccataccatgttcctttgaactaactttaacttgacacattttttccatgtgagaccaaacattatggaccctttgtacctaaacaaaaactttaggggaccctttgagaagatatttcttttttttgtttgttttcattttaactttcaaaattgttactttcttttaattgcaccatgattggtaacattgcggcttgaactcaaccgtaattttctgaagtaatgcgttgatctcactgtgattttctcctcaacgtggatttttactaccaatccagacacagccaccacttaattttctgcgtcattttttgtaattaagattgaaaataaaaagaatattttcatgtaccaaattgtcacaagttttctcattgtttagacttgagaccaagttataataaggtgtttatattatttgatttgattattgtttagggagttgcaaaccgtggagcttctgttagggttgggagagacacagagaaagcagggaagggatattttgaggacagaaggccagcttccaacatggacccatacgtggttacttccatgattgcagacacaaccattctgtggaagccatgagcaaaacctgcatgttttctccctttggatggaaaggaacagttatgcttttcttagtaggatttggtctctctctctttttaccttttgattggtactatggttggtgccttgttggttggtgcaactaactggcaagggttgttcattgttttcttctattcctttccctcgttttccgattgttacaatgacaataatttaatggttattatcagtcttgaacaaagaaatgctgattgtgaagtataataataatatatgaaattgtcatgttcattggagtaggaatttgtttctgttgctggatttgtctcgtggtataatttgatttgtgaactgatttacagttcagagattacgagataaataagattacggctgagagattacgttataaagaataataaatgaaaaattaggtaaaatgtattttttaaaaaagataaatgataattaattatgataaaaaaattagccaaaattacatttttcatcttccgggttcggatttggtgattgagaaggatcaaatttacaatttttttaaaaatgtaacatgtttttccgtcctttaaatctctgcctaaataatatttttttagtgcttaaagtatcatttaaaacattggacaaaaaacgctattaagaataaaacaaaaacatttataaagaagataaaattataaggattaaaaatatatttaaaatataattataggcttaaatatattttaataataaaatagtgggtgaaattctcttgttacttgttataataaatcttgttagaaatactaacttgggactatcaagttagactgagaaaactttcttccaacctggcttattgggctgaattgacctaaactaagtaaggtccgaaacatattctaaaatattaaaaaaataattagtttaagaaatactttactctttgaagttattttgatgacactaacacaaacaatgtattactgggagtccaacaacaacttaccaagccaaataaaagaataattggttaatattttttggtgaatgagaataattagttaaattattccttaaaagatacaaagtcactatattaaataaatttagtcggtttttttttccaaaaataattatcataattttcaaagtaaatagttgctataatatatatatatatatatatatatatatatatatatatatatatatatatatatatatatttaaaatttgaggaacaaatttgtcaatataaaaatcttaattacatttggaaaaaaagtaaaattaaaaa

SEQ ID NO: 364 - DNA, 7684 bp, Glycine max
taagagaaacaaaattacaatttaacattccatatcttttatgtttctttgccatatatactagcataaagtactaggatcatgcatttcctaatcaacctcgtcaatagattggcccgttctcaggaaaaaaaaaatcctctctatcaaacagttattccattccgttttaggttcctttttttctcaaaaactcgtgactattcctttctaggagttcaacgtctaaaatattttatacaatgagatgttataaaatgtgttaaattgttatcttttaaatatatttcttttgtttgcacgtatttctttctttaaagaaaatttcattccaaacatgacctggcactagaataaaacaccctttttagcatagattcaaacttcaattcactatattataataagagagtagttcctcccattaaattcaatctccattaataacattgatcttttatatacaatgactattgtttttattgtttaacttttctttcattttattatataagtattcacatgagataattattataattattttatgccaccaagcttttttttttaatgtttaatacaattatatatttaaaactccaactcaagattattatttaaaataaaataattccgtgttgattaattcatttgctcaatagtttcattttatcatttaaatgcaattataaatattttcctttttgtttttttttttgaagaattttcctttttgtttagaattacaataatttctatttaacatttgctatatttgttctgtcaaaaaatatttgctatatttgaatgaaacaattttttttctcaagcgataggaaactactgaatgtctagttaagaattaagaatttaagatagaatcacattgaatatttattaactttctttaacaatttaaaagatttatatatatatattttagtggagacaatagattcgttgtgatcatgtactagcgaataatttctggtattgtgataaaaataaataaataaataaattctggcatcgacacgtaaaggagactccactcacagaaagacagcacacaattcctttcccaccatgttcattattcccattgtctacgtttactgtttataactgaatctaagacaacataaatttaacatcgtgtttctcgttttgatcttgttcctgtggttagagtttagaatttgaagtagtagctgcattccatttttctccccttggaagcacgaggtaccctttattgtttgaactgtcttcttagtgtttgatgaaatgctgaaccagatttttcaggtgaaacagatggcattgactttgaaagaggaagacgcagctgactgggtttacagaggggaaggagcagttaatcttgtgctcgcttacgctggatcctcaccttcttttgtgtgttttttggtttctttccgttgcttgttgtagctgaattgtgtgcttatatgattttttttttccaagcttaatgtgtattgtgtgtgtagattgggaaagtggtccgcatacgtaaggctccaaggaatggatcgcagtcaaagagtgtgagtgtgaggaatagcatagctttgactccacatgaacgtgttctctggaaagatgtgcatcaacttatctcctcttcagacaaggaaatagttggtcaactatatgtgcagcatgttatgaagcctttgcttggttccaactctgttgatgctggggtatgtatgtatgtatgtatgtatgcatgcatgcatgtatgtatgtcagtgactgttgcattgtccctcttctagaatttttcgtcagaaacccataaacggaagttgttttattgactgaaagtggttgtttttattatcatgtgttgaagatcagttttgttattgataaaaatgggtttagtgaattgctgtgatttttggaatgaagtggttaagatgttgcgtgagaaagtaagtgattgtgattgtgattgtgatcattgacctatgcctccttggtatttgttagatgcacgtcctggtgaccagggaattccttgagttggttgagaagaatgtttctggtcaacgtcctgcgtggcgagttgaagctgccagggttgatgcacattgtgattttggccttctcatgtcagatcattctctctttgcttatggtaatgtgatgtgtaacactgaacttgcttctactgtttaacatttttctgtttttccttttaaattaaatatatctaagttttagcactgtgtcataaatagctgagatatcatcatttgccagtatgaggagttagtacataaacttgtcaaatgtttgaaggttctgtattaagctttatgtttcatttcaggcagtcaaggatctagcctctgcttatctgttgagataaaggtattgcctgcattatgtcacacactgttattttttggtttattttctctccttaaagaatacttcagtttaaattgaatatctttatctcagcttcacccctttcctctcagtctttctctttcgcttggttgtaacaataacttttattttaccttgaaaagtagcccaaatgcggatttcttcctctttcaagattcatatctgaagtaaatgctatcaaaaggagaataacccgatttgaaatgcaccaaactctgaaattgcttcaaggagaggtacatcctacaaaatttaaccttttatggtgatctagtggctgcatagtgcatacttcctgttgtcatatgttctaggctcagcatttaattctctgtcttatgattgatgttgtaatagtcaatgtccattatttatttggcattaaatctgagttagaaattctttgaatatgtttgtagatatcgcaactaagtgagtacaatccacttgatctgttctctggatccaaggaaagaattctgaaagctattaaaggtctccttacaactcctcaaaacaattttcgtgtatttttgaatggctctctcatacttggaggactgggaggtgttgcaaaaaatacagatgtttgtattgctaaagcatttgaagatgaacttaagtcaatcattcgagctgatgatgatctatgtacaaataacttatctactcttgttactgaggctttgcaaaaatcaggagtccttgataagctcctgaaggtgcagaagcttgataatattgacatagaaggggtcatccatgcatattataacattacttctcaacagtgcatggtgtgtaaggaattgagtgaagaacaggcaaaaatatatacccctttgcattcagcttcactggatgaaagtttgagaattgtaaaggactacctgatagcaacaactgcaaaagactgcagtttgatgttgtgttttagaccaaggaatgaggaggattctggatctgtgtacgataatgtatatctggactcaacggagcaatcctttgattataaggtaggcagaacatcactgttattattattggttgaaatttttggtttatagtgtttgcatgaatctgttcagttcattttaatgttgatttaaggccttgcttggggatgctgcagctttttcaaaaactgttgtcctgtaggtgctataaacagctacttctaactgtcactcagaatttgtttggtgaaagatataatatgatgtgaattcaccttaatcaataatgggtttggtagaagttattgtaccactgctccaagtatttaaagttactaaaaacaggtgttataaaatttaatgggtgcaaggtcaaattaggaaaagataaaatgtttctaggtatttcatactttttcagtcacagcagctttgaagagcatccccattgtagtacttctcaaaaaagacaagggacttttaaaagaaacaatcaaacaatatttatcagacataatttatgatttatgccgtaggttgcaattcttaaagatgctattctttttatctttatccagaaaaatgagtttcagctgtaatggttatgcactgaatatcttagtttgtttgcaatttgatctatattaggtgtattttatcgaccttgatttaaagcgcttaagtaaagtggaagactactatgaattagataagaagatagtgaactgctacagacaaatcatcaaaatggatcaaggaagaaatgaagagacaggcttgaaggcatctaatgctgcatattgagatttaataggttcgatagtgttcttttcttacttcatgagtatgttggggctgtcagattcccctgtttacgtgtttgtgcttgtatttttattatttttcctggttcatctagtatttgttgcctcctgaaatatgatatcttatgaaaataacttttttttgcaaaacatatttagtgttagtattctgcatggggtgcgttggtttgagaagcttgtttgttattatgataaattctctcatcactgtttataatgtagtctgtagatatgtggcccacgacaagtctcaaggacagatgtcaatttcacagttttttgtcggctaacgcttttggttcaatcagccgggaaaggataacatcgattggatttaaaaaattttgagactaaattacgatgttcatgttaactataatcatatttaactgattttataataactagaccagtgaacatgctctgcacgggcaacactgtttgttacagaaaatttaaccataaatatacttcgacctagagtatatttagtttcacctaggtcggagcatcttctcctcagcctcgattaggatatttttggtttgaccacggccaaggcctaaaacatcttcatcttcaactttggtcttggattaaaaatcaaaaccagttatataatcagttttggatatgtaactgattatatagccagttttttaaaattcaaaacaagctttacacagataccaaactcggttatgaaaaataagttatgattatggttatgaaatccaactttcatatgattacagttaggttattcaaataacctgacccatgaacacccataccactcaaggcgcatgtggtctttgtattgaacaccttttcaaaattccataattagactaattctagacagttctctcactcaaactcgacaccaaaatttagaaccaagttctgattaccaaaatggctcaaagaactcaagaaaaagaagagaacactctcaaatatatatataaaaaagttaaaacaaggagaaactctatttatactaattctacatagctattctggtccaaaaattagagaaaattatacaagaataaattgattaaagaaattataaaaacatttccttcactggtacttaatagaaattttgttgtacattcttatcttaaaaaagtgttgacagcacaattgaaaagctgccatgaactagaagttaattcaaaccgtgtctactaaagaggtttaattttcctttctttcaataaagactcaggagtcaagacacatactagaaatatatatctcaagctcaagtagaagaaaaggtacctaaagtagtagatgctttttgtatgcatttagttcacttgggagcgcataatagttgacaagacattaacttaaattccgaccagcatttatcaccagttacccacaactaccagcactgacacagtgacactccattaactcttcaactaaacttcttgagtagaacatgcccataaattcatgaaagcttagtcagggaataatagatgggagttaatcaagcaaatcttctctgtaccttgttttggcattgtaattatagactccaaaatcatgtctaaggtttcatatatgaatatttcatatccttacacacttccacatgatatataacattctttttgttatgtaatgtaatgataaatgttatgacctctcacctcacttcttctagaatcctatacttacattcacaggctgaagtactttcagctgttttgttcattttggtgtaagatttatctactttttggtttatgtgaggtacttgtgtggtgtaagtagaacttctgctgttcaaggtgccggcaaaaggtgatgaagttgattgcaactgttgaaggaatcgcttccattgtcctagacccagacaaaaacacagtgacagtgattggtgaggctgatccattaaggacagtaaagcctgttagaaagttcagaaaatcagcaaccattgtgagtattggccccccaaaggaagaaaagaggagaagaaggaggaaaaagaaaaggaagagaaaaaggatgctgttattcatactccgaatttgagctagagatgtgatgtgtggcctcactggtatgtgactgttgaagatgggtatagtcactgtttcattaagtaaataattaatttttcttgtgccattcgtactatcttgttaatttctttatgacagataaaatagtttatatgttacctcttctttgttcacgtccaaccttgtctcactggaacatctgcactgcaggagcagaaatttaaattgatttttttgtcatcaaaacatggtatcgaaattatttatggatgaagccgtacattatgtaaaaattatcgcattgattttacattcttattgtcgaatatgatgtgattcacgtaaccgagcttatctaatagaatgaggttattgctattgtaattgttgttggattattgaatatgatgcataatatgtattcctctgcttgaatggattgagtgttgcattgaatctgcagaattcctcggctgcgagactggccgtataaactataatgatggttctaaacataggccataatcaattttatttgatccgtacggagacaatgctctcttctttttcaatatctgcattagtagcaaggtgactataaaaagaattacatggtcactagtttggactgaggcatgaaaaaaaatggttctataaagatcaacccttaattaaaaacaaaaaaaaattgaagatgggcaaatgaaaaaaactagttacagaaattaaaattttggaaaatacaagtaagcattatgttatgattttcataaaaatctattatctattacttgtaacatttgtataaataaaattgatggaccaataaggtccaacacaattaatagatgattggatttcttaaacatgctgataactttgttggaagtgacaaatcccactttagtgatctctacgtctccagggttaatcctacgacttccggctttggggataccttacttccaacaaaaaaagaattgatttgcgtggtctgtttgtgattgtgcaaagctagtgagcagcactatgatatgtttgttgaccagaccaacagtacaagaatttgtaacataacattatggattgatgatattatgttgccaacttgccttgctgtgttagatcaaattaaggttgttaaacttcattcatggatcgtaaatttgtagtagtagaagaactgtgaagatgaacaaataatagcatgtacaatgaatcacaagaaacgtcttgatccagtgtcgttgtgacaaggtcacattgatatcaggacatgcacttcacatttcctatatctaagcagtcatctagctacaacatcttgaactgaaaaaagataatgatacgaagactcaacttacacgtaacttcacat

SEQ ID NO: 365 - DNA, 5427 bp, Glycine max
ctgaaaatgttttcagaaatcaaaccaaacatattttcatcaccgttttctgttttcagtgaaaatgaaaacagaaaacaaccaaaccaaacaccccctaattaattgaagaaacaaaaaatttcaagaaataaatgacttttatttttttaaatggtaactaaatttttttatatcataaaactaaagaaatttattttattttggaaaataagtagttatattgattaattaaaaaactaattaacaatttgataaccggataaatagatagataatcaaagcataagagttcaaatcttaagttgtattttactattttttaatctctttttttcctaacttctctcttatagaattcattattagcgtttgaatatatttatcgcgggtgagaagacgaaaagtcaaaaaatattatgacaaatatgcccataggctgacagtccacattgacaattatttcatgacaaatttgtccctccgtgtcacttaaactattttattaacggtgatggatgttacggtcaaatatatttgttacactctttacactttaagagactaaattttgtattttcatcttttaagaatacatttatcattaaattacacattaaatgacaaaaatgattatttatcctaaaaaatataaaagtcaaattatacttttaatgtatcagttattattgttttacaattttaatcttcatgtttcaactgtaataattaaattttttcaaatattataaatatataattttagtcctttcctaattcatgatctatgatactcgtggaacacaattaaagcctttaaaactaaatgggggtggggggtaattaagataaacaggaaaagacaggtgtatccccgaatcccgaatcccgaattgatgcgcataaaccattcattaagtggccggtcccttcttctctcccttacacttgctcctcctctctccttctacattactctctcttctcctaaaaatttctaatgcttccattgcttcatctgactcactcatcaatggctctgagactgaaccctatccccacccaaaccttctccctcccccaaatgcccagcctcagatctccccgcttccgcatggcttccaccctccgctccggttccaagttagtccctctctcagatccccctcttcacaaaccactctccccttttttacctcttttttatttttccataaactaaaaatcacgcatttacctcttttcaattcgattctcaactccatttatcactttgatctaccgttttgttattttattattattattattattactgttttatttcttgtttttctagctctctctctctctctctctctctctctctctctcataatagtggctttcatttgtgtgtgtaatgcctgaaatgaaagctgggaacagtgaaaacgacgcgccagtttttttcgcgtttatttttgaaattgacgtttttcttttctttaaaattaagtattttgtctgttgaaaaatgctaacctcggaagatatttttaatttattggttgggccattcccataggtttgatttggtaatctgatggttggggtggtttgatttcattcaatacaaaaccattgggttttcccttttttttttctctctttactttactttttgggtttgcatgtattttctttgggttggtgagaattggaaatggattgttatttggttgagacttgagaaatctgtttcatcgtgctacaataccgacaactttttatttcacttgctcagtttttctgttagtttgcacagtagagaaacgtgtggttaattgaattgggtttcatgttatcaattctgctgttcactctttcatattttttgaaagaaaaaaatattgcatgtctgtgtcattctataatgttcaacggttttgcaatccatgtcgaaattctaaattagtccacctgaattttgctcacgttttgtggaacttgttatttctggtttattgtttgatgttggcacatattctctaaattttgactttatttgttgggattcttctttcttcttcagtttcgagtggaatatataatcaaccatggagattggaacttgctctgtattgataccttgtgattgatttgatatggagtatggagtcttgtttcttagcccatgatttttgcatatattggtttgatgaatgttgccaactttttactaattgtgatcctcttgttggaggtgaaaataaaaagtattggtaacagttccaaattgttatttgccgttgcatcaaaatagtttttctggtcggttgagtttttggatgaagatttgaataacctaggcatgatgtaggcacgttctgtgaaactgtccatgtatgactatgtgtgcagtttgtgttgatcaatgatgcatgtgcactccattttgtgtgccatgcacatgctaggtacaggtacacgttgtgtatggctaggtacgtaataggtgtgtacaataatcttttctatggaaatgatgtgatcatgtgactgggtatggcttgggtttcagccgattttatttgccaaaaatggcatcatttccccaattgaagatatgctccccaccctcccaattcatccttaccctatacctgatagttgtgagcagagtgtctccagtttaatcatagacattggttgtgtatcttgctgtatcaaaactgattaactgtttgctatgatgccatgcaaacttcatgttccccattttttatgattttttctgtgttcatgtaatggtgtataactgttgtacatgtgggggttatatgattattgtttctaccaataataccattcactctattgatcaaatttaccggcatatgatcatttgaaaagttgttttattatttctctaaaagtcatttgaatttctttgtagagaggttgaaaatattaagaagccattcactcctcccagagaagtgcatgttcaagtaacccactctatgcctccccagaagattgagattttcaaatctttggaggattgggctgaccagaacatcttgactcatcttaaacctgtagaaaaatgttggcaaccacaggattttttacccgacccctcctcagatggatttgaagagcaagtgaaggaactgagagagagagcaaaggagattccagatgattactttgttgttcttgtcggagacatgatcacagaggaagctctgcctacttaccaaactatgttaaatactttggatggagttcgtgatgaaacaggtgccagccttacttcctgggcaatttggacaagggcatggactgctgaagaaaacagacacggtgatcttcttaacaaatatctgtacttgagtggacgagttgacatgaaacaaattgagaagacaattcagtaccttattgggtctgggatggtaagatcctatacaactgtagtctattttggtcttctgctattgtagttttattaatgaatcacacaattatgcaatgtcaaagaaactcttgctacccatttatagatactttatttgttttgagggggtggggggacgactgcctgaaatataaattttattgattaattcctctggatgcattaatgtgtcactgtcagcaacattcatattcacacgagtgtctttaaactattgaaggatcttctcagaatgaagggctagattacaaagaattggatgatactttcttgaaattcattagtaaaaataggttattatgttgctctgaagtcattacactaattgattcttcatagctgctgcacttatcacatttctggtattgacctttcttgactgattgaaattgatggataggatcctcggaccgagaacagcccctaccttggtttcatttacacttcatttcaagagagggcaaccttcatatcccacggaaacacggccaggcttgcgaaggagcatggtgacataaaattggcacagatctgcggcatgattgcctcagatgagaagcgccacgagactgcatacacaaagatagtggaaaagctgtttgaggttgatcctgatggtacagttatggcatttgccgacatgatgaggaagaagattgctatgccagcacaccttatgtatgacggccgcgacgacaacctgtttgataactactctgccgtcgcgcagcgcattggggtctacactgcaaaggactatgctgacatactcgaatttctggtggggaggtggaaggtggagcagctaaccggactttcaggtgagggaagaaaggctcaggaatacgtttgtgggctgccaccaagaatcagaaggttggaggagagagctcaagcaagaggcaaggagtcgtcaacacttaaattcagttggattcatgacagggaagtactactctaaatgcttgcaccaagggaggagcatggtgaatcttccagcaataccattctgagaaatgttgaatagttgaaaattcagtttgtcatttttatcttttttttctcctgttttttggtcttatgttatatgccactgtaaggtgaaacagttgttcttgcatggttcgcaagttaagcagttaggggcagctgtagtattagaaatgctattttttgtttcccttttctttgtggtagtgatgtctgtggaagtataagtaaacgttttttttttctctggcaattttgatgataaagaaaatttagttcttctgtggttggttcaattttgccatagggtaactgaaatatatgctttactaggtaattttattgtgtatcattttgtcaactgattacatgtaatcttgctgggatatggcttgttattttcatcctgttttactttggtgcttagaattcaggtgttatattttaatctaatttattaataggtttttaggttaatttttttaatgactttttcatgctactaaaagttctaatgaaatttttattaacgattctatatttccgttataagttcttaggtcttaattataaaattggccaaaatcaaattaataagataaataattattaggaagtatatatattttttatttgtaagaaaaggaaaaggcaacaaagaacaaaagaaacaattaaatcctttgggttgtgacacccatggcatcaccaacgttaagaattttataattcttaattaattaactacatattatattataacatttatattagttattttcatttaaatgaatttaatataaagtgatttatttaagtgagtctattagactgtcaagaaattgataacatcagtttgatccattagaggataatgagaaccgtaataggtttaaaatataaggcatgcttatgttccctatcatacaaactctcccatttgaagagaaaatggtcccataaggaagaaa

SEQ ID NO: 366 - DNA, 5549 bp, Glycine max
ttatattttctttattatatctaacatgttccttttctgtttttgtctgtaaccaatccgagagtgaaaaagaaagtgaagcctacctcgttcaccaagaaaataaatagaaacaaagaagtgtctgcataaaaaatctaagaaatgataagaaaataattgttaatgttgtgattcaataagactacatgtgataataacttgaaaacgatgatctttttaggctataaaatcgaaagaattaaaaaaaaaaaaaaaagagaggtaagaaatatgtctaaagaaaaatcaacggcaactcgaaagtgagaccatatatgaattaatgcactgaatttctgtgtctgattgtccatatttttttttatcttttacctttatgtaatggagagcccattaggttaatgaattgtactgagattcttgtagttaaagtcccattgtgcttttatgatgaatataaaaattattagatgcacttttttctggtaatttctgataccccacttcacaagatgcagtgccaagcaatggaacaggattttgtgtgtgtccatatatatatatatatatatcatcccgggtgttgttaaagttatttcatccaaattaacttaataaatacgagggaataattaacgtgttaaagttaatattaaattatttaagtattatttaaatttaattattgacgaaaataattcttaatcaaattttatttatcttctgaccgattaaattttggattagttaacatctcttcccttgataagtgggaaggttaaaaaaaagttatttccgaatccatgataagaataatagcagatgcattatatgtgaatttatgccggtatctttatctaacatttaattattacactacagatgcccataaggccatctcaatattctccaattttaagataataaattagtatttaataatattctgggaccgttttctataatatcatatgtgtgacccatcaagctttgttgttgaagttgtcctccgttggggacttctttgaacctcttattgacccatctaagtttggttgcttagttttcatcctttttctattgattctttttgcatttggtttaaattcacgtgaagacaacatttagacaaaactttttgtttgtttccatgtactctacttcgttaatgtcaattcattaatgttcattcttatcctttttttcttcttctctagaataattaatagctaatgaccttgcacggtagcatttagacaattagattcaaatcttatacctcaaggcgtttgggaatacaaaagagaattttatgccataggctcgaattggcattactattgttacctttccaattttcttctaccttcccccttccatttggtgctccttaataaggttgagcttccaaagagttattatgttatgtatgatgctacctcacaatttgtagcacatacctattatagtctacttaccatccaacttcaaattttgtgtcaatgaatgagaacaaaattgattggggaggattgattcaacaaagtcatgtactaagtggggattttaattctgagtttggcaatcgttactgtcaatattttgatatcagacaagcttggaatatgggaccacttgccatggttggaggagaagccatagataatgagttacaaaacataggccatgccaaatcatctggcaccattatgagccgttttgagtcaccagcttctgccttttatgctgcagaaaactgcatggagtttgcagaatatgattgccaagttggtattcactctttgagctctcagttatgcaagattaatgatttggagttccccttgtatcaatctccaagggaaaaccttttcttggattcagcaaaccaatctgaaaccaactttgatttatcaaacactttgcaatccatagtgaaatctcaactgaatagtgctaatcaatgcagtagatcccctgaaaagtccaataaaatttcatgtgggaattttcacagcaccaagttccttccggttgaacaacagaagttgttcattgatggtcttatcagtggctcatcatttcctaacaaaggaaatcaagaccatatggtaccattttatattcattttattatgttatatgtagattttgtcatttgttcattctttggagattcaattggcttataatatttcatttgtatgcatgtttcccgtggatctttcaatttatctgttccacagctgagattctcttctcagattgagaggttgtctccaacactttcagcaggaagtgtgtccactattggaaactctgcttctaatgtggcggccgtagtgtcaagtaaaacacgtataagatggactaaggatcttcatgagaagtttgttgagtgtgtgaatcgccttggaggcgctgagcgtaagtaacttgactgaattttttattgattggcaatacatctatttagcatctgatagtcctctctattggctgcttgactatagaggcaacaccaaaagctatattaaagatgatgaacactgatggtttgactatcttccatgtcaaaagtcatttgcagaaatatagaattgctaaattcattccagaacccagtcacggtaatttctaatcatttttttaacaaatttgcagtgtagttccttttcatgtcatgtacatttcttggtgcttgaatttactggcattcatgtcataaatgatgagcagatgtttttgctatagtgcttgtcaaggccgaggatgtagtgcgtgtttggttcaacatcttagatgtgattttaagaagctaatagtcatagcatccacatctcaaacgtgattccttccttttcaatgggttttcaaacatgctaataagcttctcttttccccttggttttgaatcattaattattgtcgtgaacttaaataaactaacgcagattgttcactgatttaatgtctttgtggttaattgacttcaagtgtaggaagttccaatgcagaataaatgcatttttatacatggtagaaagtttgagctactaaatggcaaatatagtctactttctcttcttgatgatagcaaccttagtcaaactacttaattaccaatgcttgtttcttactgtgaaatatctctttaggacatgagtgactgttctttattgctttattcttctctccagttattcataatcttcattgccttcattgttcttacattctttcaaatattaggttcattccccatactgaacctaaaaaattgtcctgtttcagggaaatctgacaaaagaacccacacaaaggatgtgcatcatcttgatgtcaaaacgtaatgctacttctattgcacataccactgttgtattcctataatttcactacttccattaagttgcttagttcattttgtaataactttagttgttacgttacaaatttactaaatctacactgctcttgatttgtagtggcatacaaattagagaggcacttaagctgcaattagatgctcaaaggtgtcttcatgaacaactagaggtacatccttgctatcattttctcttacaaccttttatttatgccagtacatttctatgctctccaagcctttattgttcttacgttgtacttaatttttccgacccttcccccttctggccttctcttataaaaagcttcaatattggccaaaccagctgaaaggttcttgaaccttgagcattgaatttcacttttttacctgtaaccggctttgcatgaaagaaatgatgcagagattttaatcacagaagaagaatgaaagtccaatagtttcacatgctcaaactctaaccactacttttaaaataatgcatcactttcaccaacaaaatatgatatatttaaaggcctttaatacatctttgtctatttgcagttttggattcttctaattcaagacatactcaacacttagcttgaaatcttgttttaatttctcatgcaaatatgcaatctagttttctgttggcataagtgatgatgtcaaattgcagtatcaagtgctaaaaggtggatataagtttccagttattggttgaaaatataatgaggaaattggatgccaaaattaatgaatgagttggatagttaggttcttataatataacactcttttcctaacttcagattttcaattatcatacttttttggtccagattcagagaaaattacagttgcgaatcgaggaacaaggcaggcaactaaagaaaatgttcgaccagcaacagaagacaagtaatgacgtctctaatactcagaattcaaccattgaagagacatcaattagtcataaagacggtgaaaatgcttccgaaggggctaacaacaattccttcttcccttccaagacctctccaagccaataatttggtggttcatatgtgtataaaattacagttttccaaaagcttactccttgtaagatacagatagaccacatcatgtgattttgttatgggaagaataacattgttctttatactacagtctacaaatgcaaactctatgaattagtacataatttagagtgattacattatatgtcctacagaaacaagaagcaatattgtattacactagctttactgggggaggagggaataaacaatatagggagggttaaaaagattaaaaaatgctgacaacgcatttttaaataaatccttattattagttaaaatttataaaaactaaaaattatgagtttcattctttacgtaataacttatattcatgattttgtaatttttaataaattttaattaataataaaaatacattcaaatatactaaaaagtttatgaataacattcctccataccgtgtcaaataaaaaaacattcctcaaaatataaatttataattttcatctcagtctactgtatttaatgcgagaatattttttttagagtttaatgcttaattatacacttcatcattcaattacaaattataatttgaattattttaagataattattttaaaaattaataaatttattataatgataatgatatgttgtaattgaatgatttgtgagtaaaatattacttattagtgcaaaaaaaatttccaatactgaaaattttcaatgttatatgagacccacaagtcttgtatgtctttgtctctccaaccgtaaaaatccagttgcaaacaaatttaatcacttataaaagaaaatgatgcaattaaatatttatctgatgatttaactactttatcatgtcaaactctaggcacaagataacggataaccaatgacgttggaacggggcattatcttatgccaagtataagcaaaaaatgattaattcaaaattttatgttttcatcttgagaaatgttattcttatttaaaatttgtataatacaattctccaaaaaaaaaaaaaaacaatcgtataataacaatgagaaaaataaaaaagagaaacaaacacagaataaagtgagtggtgtgatagaaagagcctaaaaata

SEQ ID NO: 367 - DNA, 9139 bp, Glycine max
aatatgttacaaaaactttctgacaatataaattgtcacaaaaattggtggtataaataagtagctggggactaaaacttaaaaatttatcgaataggaataagaatttaaaatgagaataactataataattaagtgaataatttgtgattaaaacattgttattccaattctttaactcatgtgtacgattttgagtaatgatttatttaagaaacataattgctatttaatttctaaaagttaatctatttttttataaataatgaaaattataaaaaaaagcataactttaaccaaattatacaaaattatatttttatatagttactttaataaattataaataattatataagatttttaaaattagaattattattaaaatatttttgttaaaaaatatattaaaagacatattccaaattgcatcaattcactgatgaaagtcctgggaataatcaataatgaattgctgcaatttctacaccgataatatatagtagtataaaaattaaacccaaatcagaaaactcaaataaaactatcaaaagaccaatgggcttcactggacgccgcataggacatgttactaagtaaaattttaggtttgaatttgtgaatgaaaaaatatgattaaaaaaaattgttaaaaatattcaactttgataaaaaataatcctccataccgtgaatattttatattaataatataataaaaaattattaaaaataatcaaaatttaattttaattaagacttaaatatattttttatgtaatttactacctaaagaataatttattttattttattacttgatattttaaggtgttataaggtgacaaattaataaaatgacacctaatcatctaatgcatttagattaacaaaaaataaaaaattgaaaatatcaaatatcagcgtcttgtggttatgcaaggatgggtataatagaattggggaatggatcctacaaaacggacaaagcgtgcatttaaaactagaaaacaaataataacgcaactcccacccaaaccgtgagtgcggaatctatcaatctcaaaccgttgaaaacacgatgcgaaatattttcaacctcaaataaataacgttgagtttccaaacttaccacactcaatcacgagccaaccataggcgaagaacggaagaagccaccatagtcgtcgtcgtgagcgaagatccataacaatacagttacaaattgcaacaacacactcctcgttcgatcgtagccagaagaatgggaagtttgggagcgattctgaagaatccagatgacttttaccctctgctgaagctgaaaatggcggcgagaaacgccgagaagcagatcccgccggagccacattgggcgttctgctacacaatgctccacaaggtttctcgaagtttcgccctcgtcattcagcaactcggcaccgagcttcgcaacgccgttagttccttgcatttctcgctccttcctacttatgcctttgattccacgttttttcttaattgacatctcttttttttttttttttcaggtttgcatattttatttggttctgcgagctctcgacaccgttggtttgtattcgtatcttcgatttgaagcctcgcgttgtatttcataacttgcgatgatgaacgatagatatttcggttttaattaactacgctgtgttgacgtggttgttcggtgtttaattttgacttatttctttatttgtttgttttattcttagcgttgaatgttgttgagtggggattgatgttatcgtcgaacggctttgggaaataaaatgtgattttaagattcacctctttgaaaaagcttttgaaaatgaaaactcaacagaaaagcagtaacacaagtttttttttctttctttttttgttctaaaaatcataattattatagaaggcatgcaaaatttgcttacactgaaactattcaaagtccatcaatctgctggatatttattgtgtctattgtctttgaaagatttatgtttaaaccttaaaattattctattgagcaactgttctattcttcagagattaaaaaggctatctatattgttgtgattttttttcttttcttttgacagaggatgatactagcatagaaacagatgtcaaggtgccaatactgatagcctttcaccgtcatatttatgatcgtgattggcacttttcatgtgagtgagtcattctttttgcttttctttttttaaaataatttcttgccaagataagattcaatacaatttgaacaaccttcttccaatctgttgtttttttagatgtaagtattcaatttaaccacatctagcttgattggattttaaactacgtacccatagcaattgcttgtaatgatatcaaagacaacctttatcaatcatcaggagaatggttttattgtatatgtgcctcaaaatttattgatgctgatctgcacattaattgtttctaatgtgactaggtggcacaaaggagtacaaagttctaatggaccagtttcatcatgtttcaactgcttttctggaacttgggaagaagtcagttcttatacttgcacatttagctaaattgaattttaatattctgcagcatatgtggtctcaagttgctgtttgtttccatccttgatccaatcagcagccctttgggttttattgccaattctatgctattattgcttattacccttggggaagaggagaggggggtgtactgtttatcattaagacatgcaactaaaatatcatttagaagttagtttgtgaatagcattttgtgagattcaatttattatcccttttctgtctggaatattaaaatttggatacggaactgttgtggcatgttgttggtctggaggttgttgtcaatgtcatgcaccttttaatgtaattacttattatgttgattattgactacacattatggataactatggtcctttgtgtttgtgattgataagaattatccattgtttccatgctatatgatagaggtttctgtatttttttttcactagctgttacttaaatttctgggtatctgtccattgctggtcacattccacttaaaatatttttttaaggctgggcagagggggggggggtctcattctataatttgtcttttcacaattgagttgggtctttgagatgtgtatatggactatagattcactgcctttattagcttctctcatttatgtgtaattagagttgtggctgtgcattctataacaaacaaattaaatgttggtcaatggttttgcagctaccaggaagcaattgaggacattaccaaaagaatgggtgctggaatggccaaatttatttgcaaggaggtttgtcgcacatggcttctgttctgcatatattcttttcattaacttagttgtagttaattaacctgtgctgacaagagattatatagagtttgttattcgtttaaatgatgtctccatctgctagtttctgttttttattgtttttttaaatgatttttggtgcttcaaactatcttttattcaggtagatgaaaatttagggagaggggaaatataatgaagagaaaacaaatagtctagtagttttattccaacaaaaaattccttaatcatttgatgttatactattattatcagtgcatctatcctaaattcttatgtacagagcactatgctgcaaaggaattcctgcatcatcttgatttatgacaagagatttttttatttttttccaggtagaaacaattgatgactatgatgaatattgtcactatgtggcgggacttgttgggctgggtttatcaaagcttttccatgcgtctggttcagaagatctggctccagatgacctttccaattcaatgggcttgtttctacaggtatcatatcatggtagtaagtaataaaaaaatacagtatggttgcaattgtttactgataggaatcttcagtttaggaagaaagaaaaagaaaacagagcactttaactgaaagagatgaatctgttttatcgaaaggataaagaaaacacaaaggagcaatcctcctttcacacaagggaatatccctgttccactatggatacaactcgatgcccctccttgtcctagcaaggatccctttatacttctcagctgaactccctctaacagaattagctgtctaacagaagtaactgtctaacagttctaactgaaaggtctaacagaattaacagtattctgtttttagactctttccctcctcctatatactattagaggtcttggttgtggctgaccttgatcctctttcctaacatttactgatatttctggccatcttttgagattgcagaaaacaaacattattcgagattatctggaagacatcaatgagatccccaagtcacgcatgttttggccacgacagatttggagtaaatatgttaacaaacttgaggtttggctctatactatagtaatttatatttaacctcgttttgttataaagttagaaaatcaattcttgcattttccaatgaaaacacacgttccaaggcaaataattaaacagttgtttgacaatattcaacagttttgttcagattaatttaagcatacagctcaattatattcaacagtttaaaattaattctatcaaacgcttaactgaaggggtacttagtctaacataaataattctttcattgctttctcccccatttcattaatctcatacaaatttcttatcatttgatggagtgatggtgaaacctgtcacacttttttttacacttgaatacctttttaactttttttctgtgtccaggtgtgctcacatatgattttcttctttgttactccaatttaacttttatgattcaggatttgaaatatgaggagaactctgttaaggcagtgcaatgcttaaatgacatggtcactaatgctctgatgcatgctgaagattgcttaacatacatggctgctttacgtgacccgcctatatttcgcttttgtgctataccccaggtgctgttcttttacttaattacttctgatattactgttattaagttcatgccaatcatcttgcaatgatataccatcatttatctgcatgttttatattgtttgcatatcatgttatgttactacagtagagttgaatctttagcagcttcttattcaattcaaataaaatacgaaaaaaataaaattactatgttctgtcagtttcttttaagtttttagcttaacacttcccaaaagatgtgtgaaaataactcatttatatacaaatttttataaagtgctttgcagaaacatagtggtaaaaccttgagacaaaatatttttaattgtaatttcatgtacaacaaatgcaagagtatagatcttctttctatggttgaacgattttctagataattagtggctgaagctttaggtatgtaaccttgctgattttagttaatattacctggaataagaaaatatttcttttgagctgcagatgttctagaggaagaagctgtatgggtcttaggcctacaatttagatttaaacaagttacagtaccttgtggtagatttactaggttcaatctgatatggaaccaatttttttctttatacattacagttgttttgtgggggtggggttagttctagttcatattcattttgtgtttaatgatttaaacaaattacagtaccttgtggtagatttactaggttcagtctgatatggaaccaatttttttctttatacattacagttgttttgtgggggtagggttagttctagtacatattcattttgtgtttaatgatttatgtatatcgcaatagttattttcataatttttcccgtgtaactttgatgtttatttgacatatgccgtgacagataatggcaattggaacacttgcattatgctacaataacattgaggtcttcagaggtgtagttaaaatgaggcgaggtaagagcaaatattttgatactaatttccttgtgatttgattttgaggcatactaaacataaagtcaaacttggtatatgtcagggaatgtgtctttgaagtcctaggaattgtgaattgctgcaatttgtatttcatgttatttcatgctgaatcaatctccataaaattaattaccttggaatctgtttgttattatggaatccacatatgcatttgtgtcaaacataacttttgtatgggcccagcacgaagtcattgagcatcttccattatattctgtgattgtatcttggatgttcaaatatcaaatctaaataaatactttgcaactattactaccacacatcttctgtagcattctcctcgtatgcatgttggttaagtactgaaagacagtttgaacttgggaagagtggccaatggcatatacttttgagttaagaggtcagcagctgcaattctatgatcgatatccctagttttgaagtgaactgataataccttaacctagatataaattattagttgaggcatttgaacaatttcctttcctcccatttcatttgacaaaatattgtttttttcttctgggaataaaaaaggatcaacatgtagctattggttttcgtgtttgttgtctgctgttgctctgtctgtgtgtgtgtgtaatactaaactagctgttatttcttcattttgttttcacttttcaatttataggtttaactgccaaagtgattgaccgaactacgactatggctgatgtctatggtgctttctttgattttgcttctatgttggagtccaaggtatgaatctttcgttgtcctgaacacattatgattaggttttcaacagaagaatgtgaatgctactcatgttgcattttacattggataatgttcctaattcctaattcctattgaatgtttataacagcaaacacattagttttacgttggataatgttgctgcttcctaccgattccattgttctaaaggaaaagatatattttagtatccaaaattttaaaatgttgatcttgttgcagtctttttttccctacagccgtagtacattccatccaccatggaactaaaagcagtttttcagtttcaagagtatcttttaaaagctgactttttccaacttaaaagattcagtattttcctttgtaggttgacaaaaatgatcccaatgcaactaaagcattgagcaggctggaagctatacagaaaacttgcagagaatctggtctcttgagtaaaaggtatgcacataaccgagtagctacaaaagtactttatctttttatcgttgacagtctagcaaccctttcattgatttaagcaggaaatcttacattgtgaaggatgaaagtggatatggctcaaccatggtacatttttgctttttttgttttttggcttaaattagcctctgatgtcaagtaataatgttaatcaatgatgtaacagcaacaatgacagtcatatgtaattttttttggtaaactgtgtttttaaatcatcatctgttcaaaacagttgatgagagatttaaaaacacaatttatataaaaaaaaaaaatacatgactgttctgctatctacattattttaactagatcctgcatttctaagaatatgcactgacggaaactattcctacagattatcgtactggtcatcatggtttccatcattttttcttatctgtctgctagccaccaaaataactagtgtaagtaagttttattgttaattaatgtacggttgaaattctaagaacaatattcgttatttataaaattcttcactcctttttttttttgtagcaactagccatgccttcttgcctttccgaacattgatatcatgcctcgttcatggaatgcaaatttgcacgcaagcaatattatgatggctgcagttgactatcgtgtattttaatggaaaaatagtcgaatgtagtgtcaagagctccttgtgttagtttggatttaactctacccctacgttcgtcctgaaaattatcattattctgcgtgttattagttgtttgtattcacggataaagttggaataccagatgagttataccagtggtgccccctcccccttttttcccctcgttgttcaaattctatagcgtggcatgccaaaatcatttacacgaaagaatgaagaaaggttaaagaggatggaaagagacaaaaagttaagggttttaatctgataattaatattcacaggaaattttttagatcaggatttgtccttgaaaactcataatcgtcgaatcacaatccatccattgtgatacaaccgtggtcaatcgcaggtttttttttaaaaaaaaaatactgaacggcaattactagtcccggctttaaagtataaactatcactttactgccctaatatttgaattgaaggctgcggttaaatattattttcacttaacagtaacatttatgattcgaactctacacattatatacaaagtttttttttttttgaaaggatatacaaagtttattaagaggtaatatacttctattgagaccaaccactcttaaataaaacaacaaataagttagatgtgtgtataaatagtagattaaatttgaaacaattattaagaaaatagtatattaaattaaataattagcttaaaaataagtaatagtaataagaatagaggaatatacaaatatttacatcaggagatattagtatttttatcctttaattttaagattaattttgattttgtcctctaattttttttatcaattcaatttagttatgcaatttctgttttttttctctctaatcaaaagggctaaaagcccaagaaaagaaagctaattagctattacacgaggaagtcaaagccccctagcatcattaaaaagcggatccttcatgaaagaaggatggtgctcaaaaatcaaaagagtctccttagcagaacaagcaaaatcagctagcttatctgcacaataattccgttccatcccacaaattgcatatgaaccagtcttcttcctgaaacacacccaagtttgttgccctttatagcagtcgagttagtgcttttgctataacgacgttaaatcccatt

SEQ ID NO: 368 - DNA, 6112 bp, Glycine max
aattggttttaataaattaatgttgagttatttattgattataatgtatgttaaaaattattttaattacaaagactccaatgtgttattctttttttgaagagaaccaatgttattttttccagtacaaacaattatgtttttgtcgttattatacttaacggtaaatttattattaaatttaagatatgtttgaatgtgctaaaaatattgtttgatctaatacttatcttcacacatttgcttttacatgatatatctaaaaccactaattactggtatatataaagaaaatgcgtaaagataagtttagatatttttgttgaaaataaagaatttcttcacaaaaattaaaataaataaataaatgacacaatttctcttgaaaaagattcaccaaaatgctcactatgtttgggtagtggtagtttgtacaatcgtacgtacaaatgaccaatgaaagattcaataaaatcatcaaatttcatattttataataataataataatgttgtcaaaataataatacaacatcattcttattttatttaattaaaataaaattaaaaattcattttcctaatttataagatgaagaatgatttgaaataaataaaaatataaaataataattattttaaaatatacaactaccaaattttaagttctagccaagtactgcaattaataatattatatatttttccaaagtagtaccaacattggtatcaagaaatgaatgaaacaaattatattaaacagaatgattatcaagaaagaatagaaacaaatacacaaaataaaacaataaaacaaatatactaatataattagtcggctactccaccaatgcaaggaatcttttgtcttggcgagagttaaacggcgttgatgtcaaagagaaacgacgacacccaaagaggagcagtgacacgtgacaagcgcgtgggtccccagcacctcggttaacgacaacgtccctttaaaacgccgccgtctgttcaattcaacgttgggattcataacgtctctctctctctcaaatccaatcatttcctgaaagacaaaaacaaaaacaaaataaaaatcgcgttcagacacactcacaattcacacaccaacaccaccaatccccaatctctaacttttcccgagaaaattataatttccattctcttttctccctcagattcccggaaaatatagtattcacaacgttatattttggcaccgccaagctccaattcaatccgtcgtcgttttcgcgaattccgaatgcgtcgacttcgggttggagaatgagttctccgtgctcttcttgtggctgtttgttggcgttcttggatctctcttcaaaccctccacagtctcctgtccaattttaactctcttaggtaaatttactttaattatatttcctttgttgttagatttctagttttgtagttaaaccttgcatagttttattttggtgtccataaattgacctaaggaattttttttttttaatttttgtttcctttaaattttagttaagggtgtttgacttgggttttattgatgtgaatgaagtgcatagatggttccatggtgggtaggttctagtgctgttgtgtattaccaatagggtggatcctaggttttctaagatttctattttggctgcaagtcaaggtttttggggtgtctgcaaccaattgattcagcaattttctgcaatatcaaagaatagacaaaactggtgacagtaatttaaaaccttgggtggatcaaatttgatgattatgttttgtttgttcttgcaaatttcagctggaatttgtttattttttgtgaattgtagtcagtttaactatgtatcacacaaagaaattttcaccggctagcatggtgccgcataaatctcaaggtggtgctgaacagcttgcaaatgctggggttttgggtggatcggctgtaaaaactgctgcaccttctgggggaagtgggaagcaacgtttaaggtggacatctgatcttcatgaccgttttgtggatgccattacacaacttggtggaccagatagtgggtatttcttttcaatattgagattaaagaacttcctctcgggaattttcttttcctgataatttattattgtcttgcaaaagcttgtaggaaagagaatgtaatatgggaatcgtttgtctcatttttaagtatgtaatgtatgtgagccttacttggttttagcacatgaaggctggttatgtgtttttattgaaagctgtgatcaatttattcctgtaactgttgagtacttgttcatcttgttacttgcactccaaggattgcattgaattgcataccaatagacaataccatatttgaactgtgtgaattgaattcaatttaatgtagccataaatgagtgttaatcctaccttttaaattataaatgacccggaagttttattttgacacaaaatcagttcacctttttaataattttgaaaattcttcgggaagtgccatttttatttttatttttgagaaaaaatagtcatatctgatactcatgagtgaatatttttaattcttcaggaagtgccatttttatttttatttttacctatattcctggaaactttttaaatatttttaattaatcatggcaggagcaacaccaaaaggtgttcttagagtgatgggtgttcctggactgaccatttatcatgttaaaagtcatttacaggtattattatcttgcttaataatttaggtatgtgcacataaaatgtcaactttataaattgattctaattcttctttgatattgtcattatatatagaaatatcgccttgcaaaatacttgcctgaatcaccagctgatggtaaaggtgccttcttttctttttccctttcctaaaacaaattaattagaaatctgtgattttttttaaaataaattttggactttcagaccctaaagatgagaagaggatgtctggggacagcatttctggtgcagattcttcctcgtgggtatcataattgttttctttagataatttataactcctccaactgtgcttcctcttctgacattttaatgaaacctttacggcttccaggggaatgccaatcaatgatgccctaagaatgcagatggaggttcaaaaacgtctgcatgagcagcttgaggttcggtacctgctcttactattgttcctaattgctgaaagagaacactatttagcactcttacttcccctcttgttcagtaatcatgggttagaggtttagaaagagttatatgctaaaagataaaaaagaaataaaaacgatgataatacatactaatctgtatttctgtaagctggaaatagggcaaaaataatgggttcagaataacatgcaacaatatacttcctgtatctccccgatgatagcagacagatcatttctcttctgtttagagctcataccacacagtttttgcaagtatctaattttctcagcccatcttgatttcgctgttgtatgattaaacttggactctctacctcatccatccttgtattatatcatttccttaacaatctcagccattgacaaattaagtcaattttgtttgttattacagtattaatgatttttattttttgttgattgaatgaaattggaacatgtgacatgtatcctaaagagaagcaactgaataagctttcatgtggttgatgagtgattagtctaaatttaacttacaatagaaacttcaaatgtcaataataatttgagaatggatcaatttttacacaaatgatttaatatttaatttcgaattcatttattttttcttcatttaccaaaactttttgaacattccgtaagtacattgggagtaaatagaaggcacttcttaattggttggcttgtaaattttttgtaattctttgaaatatgtcaattatgttaatctgtccgagtcatgcatcttttgctggctgggtgaacccatcacttaaataagtattctgattaagaggaattattagcttctatttaacctcaggacttgcgtaaaccaataataagataaatgctactagttaaatttcatagtattgtgcttctattgaaaaaaataagtagtattgtgcttctattgaaaaaaataaatagtattgtgcttctatgaggaagcatttctgataatgataaaagccttgcatctttttcaatgacatttcaggttcaaaagcaattacaaatgagaattgaagcacagggtaaatacttgcaaaagatcatagaggaacagcagaaattaggtagtaccttgacaacctcggaaaccctccctttgtcccatgataagcaaaatcatcctcagtcagaggcttctggatctagtgatgcccttgcaagcactgtgtctccacttaaaaaacagagaatcgatgatggttccaaggaaggcttcactgcttcccaagtaagaaagaatgacaatgttggtcagttggatccaaacttatatgatgatgctgggtttggatttgatttggagacaaaaaaggatgaagataatgagagtggacagtaagaactaggatccatttgtaggtcaatgtgtctcattgtaatgtttagtgtatttttctggtagaaaatacaaatcatgctttgtaaattatatttcacgcaatccatttgtacatattaatgtagatatagatgcattcttctctcctggtttgaaagtcatagacactgcactctccatccaacagaaatgctttgacttgcattacacgtgtggtcatggatgatgaatgttgggtgcatgatacttatcgatgttcaagttatgatctaagtcaatatcaaaggtatcaattagctggtgacgacattgtttgatccttatagccaacctaatcaggggagaaaggacttggttcttattgttggagatagtaatgaccagcttccctttatattagttatttaatttaattatgtattttcttcgaggttaatgttgttcagcatatttatacttgtgattgtgatgctatctaacctatgaggctatgagtaatactatatcttctttctccgtaaagtatgaaaatattcaaccaaaaaaaaaaacaaaactgtactactggatgtattgtgatttgtgagtgtaagaattcttatattgtgattcaatcagaaattgacatttacactttcttgattcgaagagttttaataacattctcttttaacgtattttttgtaagatattctcttctgttaattaaaatttattgtagagtataaaatcagtaaaattatgtaatttctaataaattttaactaataaaagaaagggttaaaaaaatggtcaaaagagtgttaaagtatatgtttttacttcttagtatttcttcacttgacttttataatacattgtttttacacgttttggtagagaataaatttttgtatgtctgggaatcatgattcacaagcaatcaatgtttcttagaaataaataaatttatataaataaatttatttggttgactattgtaaatctttaaataatttttaaaaaaaattaaaaatttgtgtatatttttattgattattttaattatttatcatattatataatttaataaaaaataacatgacattttttttactgtaacaaaaaataattaaactcaaaaaaataagattttcacattttttatgattttttttttatgaaaaactgattaaaaaacatttattggtaccaaacatgaaaaattaaattttcaacctaacatttccgaaaaactaaaaatttatctccagtcaaaccgtgttctaagagatatacattaaccccaaacttcagcgaagctttgccaaaaagtagtgtttcagacagttcattatttatgactctgttccatagtaattgacattaatgttaactaagtatttcatgataagataagattaatgaccgtttctttgtctagtgtagcgttgcccctcttctccaccttaacaatcctttcatttgggtgcagccagtgcaggcatactcctacgttcaacattaattaggcaaacataag

SEQ ID NO: 369 - DNA, 5208 bp, Glycine max
aatttattaaaaactacttcatctgttcttatttataagataaatttattaatataaactaaatcagtttttttttataatattgatagaaacagagggagtataaaatcattatagttaaactttataaaatcataaatgaaactcattaaacaaagagtaaagattcacaattttatgatttttaataaattttaataaataacaaaaaatttatttaaaagcctttattcatctaaaatcattaaagtgtaagttactaatatttctcttacattataagatcttttttcaagttgtcttttgcattaaatattttttaatcgaaatatctttaattactttacaatgaatgttataaattaaaaagataaatgcattatttgtcttataaggattaaagaataagactagcatataatcattaattagataatgaataattgagtgaaaagaaaaacatgagtctcaataattttaagggtaattttgaaaagataatagaaattgctaaaatatttaatgttactaaaaattaatcaattttcttaaaaaaatatgaattagtgaaaagatcttatacttagagatcacgagggtatcatctaattaacttgaatatttttttggtatataatagtgacgatgataaaaacctctgttgtatttgaaaacatataaacaaaatgtctcttccaatccttaatcagcttgcaaacttcaattatggcacgcacattagtacgttacactatgttattagtgagttggagtgtaggaattattattggaacacaccgaaataaacgtaaaaatactatgtagtggtgaatgcaaaaaaaaaaaaaaaaattggcaaagaaattaattagagagttaataatatccaacgagcaattaaggaaaaaggcatcgtaggagcacaatagctgttgaatggagcgaagagagcgcgaaaagctaaggtatatgcttgtcgaatattttggacaagtgtggttttccttttcccatgttctgttatattctataaatcattggccactctccattcacctcttagtgtgtaaccaattcttctcttttgctttctctctccaaattcatcacaacttctctcgtacctctgcaggtcagattcataataatattctttttgtcctttttgttgcatcgaatccttctatatattgtcgcatccccatgcatgcattatgtcactacgtctactcttgatgtttcttttatatcccatttcatatcatgttttttcatgaatttacctgtttatgttctgttttactcttatcctaatttaatagatgtgccatttagacgtagcatacatgactcagcaagacgatttctgaattgatttgcagatattggcagggatttaatgattgtctttgcatgaaaattgaaaactgaaagcaaatatatttacattaccattaattttgtgtgtatgtcatttgttttttgagttcagatcgtgatatcttttgcattttctcgtggcagcagcgctagtttatcatatatgaattcacctgtacctgtttgttctcttatgtcctggtcttctttctaaaggacatatttgttcgattacaatttttcccaatgaattttggtacatctgaagcatactttttcattttttctccctcatacgtttccccttcggaggcaatcctatttgaggtactgatgggcactcatagtgggcatctctcccagcgaggattcgaaccttggttcgtcacgttgtggagaactagtatctcgttttgttaaacgtattggatacatattaaaataaatttgttcagaaatattagtatgcatcttgagtacgactttaattagataattgggtatagtttggtatatcttaaatactagtttgattgcccctatcttatattcttcttttatgttattaaaaaattgaattagcatagctttaattttttatgtaactaccgtgctcgctcaacttggttggaaaggccttccagttttccaatataaggtaacacatggtgctgtagctggattactctgcatgtattgtttaacatgcttttacctttcttatgttgtgtaactagaattgaaattctatctgtacataattgattatctcgcagcctgattgagttagtattttttatggttctagtactgttcatggtcatcatatggcagtcactaatgaaaaatgaccctgcatatgcatattggtgctatgtttttgaacttttagcacaatactttgtaatctgttgcatccacttttgcagagaagtaaacatataggagtgagagggagggagagagaaggaaagcttggtagcgatggggaaggagcaagttcaggtgctgaatgccctggacgtggcaaagacacaatggtatcatttcacagcaatcatcattgctggaatgggcttcttcactgatgcttatgatctgttctgtatatcactagtcacaaagctacttggtcgcatttactaccacgttgatggggctgcaaagcctggttcattgcctcccaatgtgtcagctgcagttaatggtgtagcttttgttggaacactttcagggcaactcttctttggctggctcggcgacaaaatgggccgaaaaaaggtctatggcatgacccttgcgcttatggttatagcttccattgcttcgggtctatccttcggacacgatgcaaagactgtgatgacaactctatgcttctttcgcttctggcttggttttggcattggtggagactaccctctttcggccaccataatgtctgagtattctaataagaagactcgaggtgcctttatagctgcagtgtttgccatgcagggttttggaattttggcaggaggtgtgtttgctattatcatagcatctgtgttcaagtccaagtttgattctccaccatacgaggttgatccgttgggttcgactgttccacaagcagactatgtttggaggataattctcatgtttggagcaattcctgctgcaatgacttactactcgcgatccaagatgccagaaaccgctcgttacactgccttggttgccaagaatatggagaaggctgcagcagatatgtctaaggttatgaacatggagattcaagccgagccaaagaaggaggaggaggcacaagctaaatcatatggattgttctccaaggagttcatgagtcgccatggactgcatctgctcggaacaacaagcacatggttcttgcttgacattgcattctacagccaaaatcttttccagaaggatatcttcagcgcaattggttggattcctccggcaaaaacaatgaatgctcttgaggaggttttctttattgcaagggctcaaactcttattgctctatgcagtacagttcctggatactggttcactgtggccttcattgataggataggaagattcgccatccaattgatgggattcttctttatgactatcttcatgtttgctcttgccattccctatgatcactggactcttagggagaacagaattggatttgtggtcatttactctctcacattcttctttgcaaactttgggcctaatgccaccacatttgttgtgccggcggagattttcccagctagatttagatccacttgccatggaatatcttcagcatctgggaagctcggggctatggttggtgcattcgggtttttatatttggcacagaatcaggacccgagcaaagcagatgcagggtaccctgcaggtattggtgtgaggaattcactgcttgtgttgggtgtgattaacattttaggcttcatgttcactttcttggtgcctgaggccaagggtagatccttggaggagatttcgggagagcaagaagaggagaccaaggtgtaaaaataatggcaacagaataattcagtgtctttctctagtttattagtgatctgttactagaataaagccgtgccttaattcggctagggaattgttgccaaagctttcccttcccgtttgattatttctttttctatttggttctgctctatcttgttgtaatgatagggacctgaggtactgcttgttctttgaattttgagaaaatagatattggaatgtgtagttcttcctataatcttcctgctgaattagatcattagagtaattattcttgaccacgaagtttaattcattcttctacattctttcagaaatttagacttctgcactgaatatgttctcgcattttgaaagtaataaatagtggagttggtttcattcaattttctctagcctgccacatcattttttcatctataaaagctaaggtattgattgacagaacttgttttctagctcggtttattatggtgttactgtgtttactcacctatttactcctttcacataaggagcaagatgattattattctgtgaaaaatattgagttcacttgagattgagacataatgagggtttagtaaggatgatgcctatataggataagggcctgtgctcttacttttcacaaagtgggaaagaaggtggaagaaaaatgactatcctcaataggtgttaaagtgttttaggtcagttaactttgtgctttggtaatacttaaggttaacgcaagtatgatcaattacatatatccacactaaaagaatatccaaataacaaggactgatatgcaaagcgtctccaagaaaaggatcatgactgaaattaggcttgatatctttgggtgtgtatcatggttcaattaggctcacgatacaaactgacaaataaatgaatgttaaactttagcaaattctcttggcttttgcttgatatctctagtatttataggaaggcttcaaggtattcatcgtgacttttgttgagtttctttacttttatttcttcaatgagagaaaatgattgttgggggcattaaatgtctttcactaattagtcactttgatatgataaaacattgtgtttatctctcctttcttgtacatgaaatcttttagaagttagcatgtttactttatattccgaaaagtacgttcaagttctatttcttataagcacaccttgttaggagttacagtagcttataccttgttgaccttgtttttttagcattttaagtgtacatttgagatatatcagatcacgggctcataa

SEQ ID NO: 370 - DNA, 4520 bp, Glycine max
taaatattttttttatttataatcttaattaatatttttttcaatttatgaaaaatcttataatattaaaaaatatataaattctgataaaatattttttagaatgaattttggatgaattttataaaaaaaatagtaaaaaatataagtaccacattcattaaataatttcacttatgttcttgacattttttagtactttttgtttgtcggttgtcaaaactatctttttatcacatataatatctttttctattcatcgaaggtaatgtacacattcataattttcttcttcacaacaaatatcaccatgacgataaagaattttcaattgaattaatagataaatcttcatcccctatttttagaagacaatgtaaacattcataacttttttcacaaaaaatgtcactatgaagatgaattttcaattgagttaatagaaaaatcttcattttcagtattatcagttaacaaataccgtaaatttgaatttgatattcaaattcaagagtgtgagcaagaagatgctaatgcattgaggcttaataaatacatgaagaaacattatacaggaagtcatttttttaaacggaactagaatcaattaactattaaaatattgaaaaaaattgtattagttttagttttctttatgtaaattttatcatttatttgttatcttctttgttgattcttataatcgtgaatgttttctaaaattttataaatctataaaatattttcaaattttttgaattgatatgttataaattattaaaataaaaaactacaaaattttaatcataaaaacaaaaatcttgtaaaattcacatgtaaaattatgaaagcctggttgggttttatctacgaagcgaagcggaaaaagtgaggcaacgacatatttggtgacgtcatgaggatggttgatgatagaaagaaagattgaagcggaagtacattgttgtcggaggctcaggcagttactgttactgttattatggaactcaaacaacaaaaactccttcttgttctgattctaacgcttctttttgccactgccacgcctgattctgaatacgttcgacctcttcctcgtaaaaccttaacaaccatcccatgggattcaatttccaaggcccactcctcttaccctcaacaggtgctcaaccaacctctctttcattcctcatattcatacataaatataatacttttgtgctatttattccctacgtgatcaatcttacagtacctgatttctttcgtatttgattgtattaaggtgttcagttgtgagggttctttttttttttttaatatagggttgtattttcaaaattattctctgtttcatgttatcgagtttaattatttatatggtgaataaaaaaaattatattattaatcaatcagaaattatcgctgataagactattaagacagtgactttggtagcatgtctccggggttcaagatataaccctgtaaggtttctttggtgatgaaattctaacttgatccaataattttctgtcactcttgtattgggtttatagttcatgaactgggttctagtcgtaaatcttcaaaagacattttttatttgtgatagttggtgatttgttatagtatctatgcacagacaatgattattgtttatctcattatctgcttattttgcaacttgaacagtttgtttcgcttactaggaattatttgccaattctaggacaaatattctgtgaactgaacagtcaaccgtgcttgttttattaagcaatcatatcggcctctttatgcatgttcgtttatggtgactattcaacttaagtttctttgatgccaaatgtttgttccaggtacacatttctttggcaggagacaagcacatgagagttacatggataaccgatgataaacattcaccttcatatgtagaatacggaacattacctgggagatatgactcaatagctgaaggagagtgcacctcttataactatctgctatatagctcaggaaagatacatcacgctgtaattggacctttggaagacaatactgtgtacttttacaggtgtggtggaaaaggtgccgagttcgagctcaaaactcctccagctcaatttccaattacttttgctgtggctggggatctgggtcaaactggttggactaaatcaacactggctcacattgatcaatgtaaatatgatgtctacctgctaccaggagacctttcatatgctgattgtatgcagcatctgtgggacaattttgggaaacttgtggagccgtttgcgagtacaaggccatggatggtaactgagggaaaccatgaagaggagaacatactattgttaacggatgagtttgtgtcctataattccagatggaaaatgccatttgaggaaagtggatcaacttcaaatctctattattcttttgaagttgcaggtgttcacgttataatgcttggctcctatgcagattatgatgtgtactctgaacaatacagatggctaaaggttagttgatttcacctattggtcaagagtttctataattggataagtgtaatgcaatccatgatcatggaaaactacacaatcatgcttgttattattattttaatttgtcttttttacactactctatcattttaaaaagaaaactactttggagtttggaccacttcatttttttcactcttaaatttttttctcatccctcatctacaggaagatctgtcaaaggtggataggaaaaggacaccttggctgcttgtgttatttcatgtgccatggtataatagtaacaaggctcatcaaggtgcaggagatgatatgatggcagctatggagccgttgctttatgctgctagtgttgatttagttatcgctggtcatgttcacgcttatgaacgttcagtatgtctttatggtttagcattttatcctctttgtaagcaccatttagtgggaaccgggttttaatactctctctgattgtcagaaacgtttgtataatggaagattggatccctgtggtgctgtccatataactattggtgatggaggaaacagagaaggcttagctcataagtaagtttcacagccagaaacatcccacagaaatctgttctctgaatcgtttgttatgtgaaaaaaaactatattgaggtttatcgtcatgtatgcagcctgaaatttgtttttctgtcattgttgctggatgtatccttacataatttgttgacaggtatataaacccgcagccaaagtggtcagaattccgtgaagccagttttggtcatggtgagctgaagattgtaaactccactcatgccttctggagttggcataggaatgatgatgatgaaccagtaaaagctgatgatatctggataacctctttggtcagctcacgctgcgttgatcagaagacacatgaactcagaagtacacttactatgcccgaaaactcagaacttcgtggattagcaaaagttatgtaaatattgacgatgagacaattccttagtttagtttgtatcactacaagcagcagagtgagtaaactgaggtatttcagtacatagctgctggttgtgctggtgcatgtatttaaatattctaaggacatggactagtcagtaaatggagtacaaggctagttgtcactttgcaattgatggtgttgcttgttttgtctgaacttttaagattggtttctgatttctatataggaaaaccaaaacttaggttacttaataaccagcgataaatatgtatattttatattcttaactgacattgagattttagattatgattcaagagccacgcaacgagtaaagccatgattactgggatgcacgaatgtctaattaacaaaatgccttaaatctgaaatcattgttcgctgataccagggaaatgggatatgattgaatgtaaatcagcaatctaagaatagaactgtaaaaacagcagagaggataataaagcattaagtgaaaacttctgggttggcctattctgtcttgaagtactaaaactgatttatccaatatacatgaaatccggtaaatagaatgtaattgcattaatcaagtggttggatgatgggtagctttagcactgtctgattctgatgactgctgaggtttctgtaatcattaatggtccagcatgatgcttgcagtgtctcttggcttgatgttgaaaccagcaagcatgagagccatgattctgtctgaaagttctcgaggaacatgctctccccactttctttcttccgtcccgagtttagtcaattccctcttattttcttcccctttccattttttttcatttttgctttgattttattctttttaacctgtccttttaaaattttagaaaatcatttgagctccttttattttgttctccacccacacacaactttgagatttctaagaagtaaaaggtgctacccattcctcaaaatttttttacatgatatctttgtgg

SEQ ID NO: 371 - DNA, 5856 bp, Glycine max
taatattgcctcgcactctatcatctccacctttgtcgacaacaaacccttcatcaggtccaaccaacaaacacaaaagcaagtattgaaaaatcaaaacacttataatggcatttagaggaatgaaatccagattcgaagtgaatgaatgagaccaagaatttcaaacaaaatcaattcaagaatcaagaaggataatcaaagaaacaaatgtaaaaaaaaaaggcaatcaagaagtgaatgaaagtgaatatccaaaaattacaaaatccaacgaaataatgaaaaacccaaatcgagaagaaaaaaaaacaatacacaacgaaggtaaaaggaagggatctttatccatagattcctcaacttttgtgttcgcattcaaagacaaactctctctgtcacattgttattctcgccaacaaccatattttttattgtttgtagatttataactcatcttcacacatgagattgcacacagtaatgaaagtgacctcttacaaactcattttcacacatgaggttgcacacaataatgaaagtgacgtctcaccctccaaagtaggtgattgtctttggtttcatgtcattgcaatggttgttccaatggttccgctgtgatgattgtgcttgcagtaaacaaaagagaaaaagtaggataaaagaggggaaataaaaaggggcataagaaaaagtgagggagaaaacatgtttgaaggacaaggctagaggatgacacatgtcagttaatgaaagttgctaacagttaatgtctaaattgaaaagatcaaaattgtgtgattagataaaaaaaaaggaggacaaaatgcattaataattttaaaaaattatcaaaattgagattagagacaattaaagaggagaacaaatttacaattttatcttcttggttctgatttgtgaagtgggccttattggactttagaatattgagtccatttgcaaggaaattggaagcaaatagaggcgtcgacgtgtctgttgaggttccagtgagtgacgggtctgtttgcagtccacacaaacaccatcatcatcatgttcttatctcatgttatgcgacggcgactcttctttcttcttcttcctcttcttcctcacattttcttattctatttctcattttacctgcacttggcctcttctacgccgcaaggcatgtttccaactttgctcattctaaattatatctctgcccttaactactattataaactaaattttgtaacttggctaatgaaaacaagtgggtatgcaatattcttggacaattatattttccttttattatagagtctttagtattccattttgggctatgattacctctgcattctaaatgatatcctgttgatcttgttgatttggttttcacagtatcaggttacatttggagttgaagacatatacatatattaatatattattattattattatattatatgtatatatggcaacgtggggtgcgcactcaatgttgttatcccatggggaaggcactggcactcccaaagtatgtgtaaaagcaggccttacggttagaggtgatttaaggtttcacaggactagaggttttaaatatgctcctagtgtggtagtgctcaaagtgttggccaccgccagaaagccaacacggttgcgcttgttaagaccttattgcagtgtgagggggcaacacgaccatgggaaaggatatttttctcccactaattcacaaataccacgggttagtaaccgctgcttagtttatcctacttcattgttaatgcaatcatgcttatcccttttgtgaaaatgcaaaatttgttcctaagattgcacctttatatccaatgtccatcctctgagtttactttacaccttgtttggatagcaacatatattgaaattcgccgcggatcgaatgcttgcgtttctcaaagattggagtaatttacgcatcacggcagtagctggcatattggtatccgttttaatgatcattccaccagctgatgctgttgacgctctcaaaacttgtgcttgcttgttgaaggattgcaggtatgccatctttctttctcttgttcttgttctgccatgactacatgttatggccaccaatttcatactcttttgtctatgcaggatagaactggctaagtgtctttcaaacccatcttgtgcggccaatattgcttgtcttcaaacttgcaacaatagacctgatgagaccgaatgccaagttagtctcgcgctttacatcaaattcatgcctgcaccattattcatgtctccaaatcctgctcatgaagcttttattttcttcttatttttccagattaaatgtggggacctgtttgaaaacagtgtggttgatgaattcaatgaatgtgcagtatcacggaagaaatgtgtacctaagaaatctgatgtgggagaatttcctgctccaaatcctgatgtccttgttaatagctttaacattgctgagttcagtggcaagtggttcatcactagtggcttaaatcctaccttcgatacctttgactgccaattacatgaatttcacacagaatccaacaaacttgtgggtaatttgtcatggagaatacggactccagatgctggatttattactaggtccgctgagcagagatttgtacaagatccttcctatcctgggatcctttacaatcatgacaataagtaccttcactatcaagatgactggtaatttgttattcataagctttcttttcaatttttacttagctagacatgtatagttaattgcaactacatccacacgaagcacattgacgtgagggttgtgctagagccaaaataaaactagcttcctacttacttgtagagttgtagtgtaattaaggcacagaccaaatcatgtttcttaattaagttaggagagttagaaaaggttgttttgatcattatcaggagataaaaaaattcagcaaacttgaataaaaatttaattggtatgaagctcgacttaagaaattcacacacatggtagaattcatcacaaatcactatactgattctagatccaatcattgttaatggttcaattgtctactggaaaacatcctctgattcaatcaatgaaggacaacgccaatttgcaattgcaacaccaatgtttaggtccaattgatttaagaatgatccaatttaattagaccgcaaattcattagtgtagcttctaaacaaattctgaaataaattccaaaacctaatcagatctagttcaggcataaacatgcttataaacagatttggaaaagaaggggaagtttgaatccaaaatagaattaagaacaagtctcagaatccaaatcattagccttctatagcaatcaccaatggagaaactaaaaatgcataaaacgcaaacaaggggggaaaaccttgaatctgaaaggtcacaactacacaaatggtccaagtctatttttgcactatgtttttcctcttttgtaactaattatctcctaatcccaagattacccttatcccaactattagcccatgtaataagcttttcaacgatatctcatttacctaacttgcccttgaatttaatgatatatgctcaaaagacaaaaggtatgtcatgcatgctcgcccaatacttctggtctaactctaaagctgaattttaacactgaaattcccgaattcgtcctttttacaaagtttgtagatatctttattaactttcgtagcatataaagaacgtcataattagaggtctatagcttaagttatgactaaaatgctgatatagtgtcaaaatataactaatgctgtcaaaattattcactgcccaatttggcccaataattcaaattagtggtaggactaatcaatcaagaccaaaacctcataagcaaggcaattaaatatgttaaaaatagtagttatcatacaccctgtgtttgaaggaagtaaatgttcctttcctagatcagaaaaagaatacaacatgttgttccttttacgtgtgcatacattaaatcatttaacatttgccagatatttgaatcaaagagtcttttgttaacattagaagacttacaaacaatgatatatatatatatataggtatattttgtcatccaagattgagaataaatcagatgactacgtatttgtatactaccgaggcagaaacgatgcttgggatggttatggaggtgctgttgtatacacaaggagtgcagttttgcctgaatctatagttcctgaacttgaaaaagcatctaagagtgtgggaagagactttagcaagttcatcaggacagataacacatgcgggccagagccttccctggtggaaaggctggagaaaaaggtagaggaaggagaagagaccattgtaagggaagttgaacagatagaagaagaggtggagaaggtggggaaaacggaggcgaccttatttcagaagttggcagaagggttcaaaatgtttcaagaagacgaggaaaatttcttaagagggttatcaaaagaagaaatggagattcttgatgggcttaaaatggaagccggtgaagtagaaaagctctttggacgtgccttgccgattaggaaactaagataagtctgagaaccatgtccaagataacttggcatcataatctttttttatcatctttgcttttattcgttgactacatatattgcatggctgtagatagctttcctccttaatcattgcttttatgttgacatactaatgattattcaaatatttgtaacagcatttatcaattgttgtatatatattcagagtattgcatttgcataggtttagatgcttgtgctttttttcaagtcgaaaatatttggaatgggaattccgacatgaggaatgctgtatactaccagtgttcttcctcaactactaatacatgaccatcaatcatattaatcattgaaataaaacattcactaattgttatcagtatggtgttttataaaaaaatgagttattcatataataatttatacaacattttttacctttatctttttttgtcacatcatttattgcatctcatgttttcctcttttctttatttctcactcaattgtaaaatttgttgctcaatttttcatataatttagtgtacaaataatatctctctataaaagcataataaaacttttctttttagaatgacttgtgatgcggttgttgagacatccgttttctccctttactttttctggtaatatagtacgtgtctgagttcatttatcaggaagaagtaaaaaaaattgacagtacatatgaatttatagaaattcatgggttgttcaactccgcaacacatggaccacaaaggaagaatcaatccaaagcaattgtcatgggcctaaactccaaattatccaagtttgagtcagtcagtgtcagacactggataggaattaggatggtggagctttatgaaaagaaagggataatatggtagaggccacgtcatcacttatttgtataaatgccttaattgaaatgtcaaaaaactatggaaaattagatagtatttgctttagttgaaatgtcaaaaaactatgaaaaattagatagtatttgcacatttaaaaaaatttttgaaattaaataatcaatacagctataaaaggaagaagtgattattttaagttgatatgcaacaactaatcttttattataaatgaaagacaacatttttcaatcagatgtcattttataaataaataaataaaaaaagcagaacaaatcttaatacttgaactttaggcaaatcaaagagagaatttgaacccgaaagaaac

SEQ ID NO: 372 - DNA, 3457 bp, Glycine max
gtattctgttttttaaaatatatattaatattatttaatattaatattgatacattatttttaataatattttatattattaattatgcataataattaatgatataaaaatattatatatttttcaaatccgtacatcgcataagtacgaaatctaatttaattatataaaacattacttttcattttttttttacttcaaacgcgtgtaataataagaaaacagtgaggaaggtttgtatgtgtggaacatttcataagtaaatttgtcattaaaatagctctgattgcaattacaaagtatgatttaagttgataaatgaagctttcgtatggatagattctatgattttctatccaaaatgaggggttttaaaaatctgaaatatttgtattatttccgcacccataataatatattttcatgtgcattaaatgttcaaccgttattttagagaaattttttatcctaagataattaattaatatttttgtactaggaatatccaatgctcctgcttgacgtgtcaattcaggatttgtcgacttgagatttccttgtccaatcctcctaccagctagtgactaacttccacgtttagattcaggaccgcataaaaccccagttagaatttggaagaatctagacacatcctttgtcctaattattgagcatttaagctaccattgcttttcaaaaactccagcttgatttatgttttttttttctttttttaaatgtaaaattcagcagaagaaatgagtgagtgtactaagtttgaggcaggaaatgaaaggacccaaatattatttcataataacatttcaaatgaaaacattatcaccatacccacaaatagtgtaggagacgtggtcactcttgttgcctgtcatcaactattacaccacatccacacccttgttaaattaaagatggtattccattctatcacattttggtaatctcttaaaatatagaacacactaccctcaacatagtaaagcagctggtgcaagtgaagcaatggctcaaaccatgttgctcatgtctagtgtctctagcagttattccgtggatttgaagaaagaccttttcctccaattgcagagtcaaagtttaaggcctaagttctctcaactctcattcaacccacttccaccatcaacttcttccttttcttcaccccgtacattcacaaccctggctctcttcaaatctaagacaaaagccgctcctgctaagactaaggtactcattttccatttttatcataaaaggaaacttgtgtctaatctaatgcttcttttttcagcacactgaatttggtttcatgatacattgcaggttacaaagccaaagcaaaaggttgaagatggtatctttggcacttctggaggatttggttttactaagcagaacgagctctttgtgggtcgtgttgctatgcttggttttgcagtaagtgaatcttaccatatggttcaactccttaatcgtcacattatatgagaattgagaattgaacatcttggatattagttaggaagatttagaaagaaaaaaaaatggaattaaatatcctaaaacaagtaactagtttaaaatatagtctttgaaattaaattgattttgaatttgccccagaagcattaagaaatgttgcattaatttgcaggcatcattgttgggtgaaggaataactgggaaaggaatcctagcacaattaaacctggaaactggaattcccatttatgaagcggagcctcttcttctgtttttcatcctcttcaccctgctaggagccattggaggtttaggtgaccgtggaaaatttgtcgatgacgaacctactactggaggtgttattccttcaggcaaaggcttcagggaagcccttgggctcggttcaggtaactttaatttttaatttcttaactttataaaagagtagtgattaaataatatcataagattaataatatgtaaagttgattttgtgtctaaagtgattaaaattccgttatatactttgtctaaatagtgtaaagttgcttttgaatatagatgtatatcatcatagtctaaattggttacatttttgataatataaaacttgggtttttggcattttcaggtcctttattcggattcacgaaagcgaacgagctatttgtgggaagattggctcaattgggtttcgttttctcattgattggagaaattattactggaaagggagctctagcccaactcaacattgagacgggggtaccaatcaacgaaatcgagcccctagtgttgttcaacgttcttttcttcttcattgctgctttgaatcctggaactggcaaattcgttacagatgacggggaggatgattagacactaacccttttgtttgcttgtgtttaaaatactcgtttcctcatctatcataaaatgcattgagttcgtcgtaaacaattctatatcatttttctcaatagttgcacgcgtctcgatgtcatgattagacatcattttttcctttagtaaattaaaatcatagtacttcgatttatctgtaaaaatcataatggaactcaaattaaatctcctatggtctcaatataaaatgagatatcattccgcgtgattgaagaaagtgagacgatattggtatcgggatcataacatattaacacgtataatcaatttttaaaactcaacacactttcaagtttcaagttgcatttaactatttaaaattaattatattaaaattagattccagtaatattacatacaaatgatgagtgcggctgcttctcgaaggacatttcattgttgtgtaaaagatgatttagaattgcgttttaactatcgttataatttatcgcccctaaacagacttttggttgttggtttaactaaacaaattccattcgtcatcgtcacttcatttttattatcttttggtgtttcggattttttttttgtttttattttataatcgttgatcgttgacatgtgccaccaaacacgcttaggcgtttaaataatgcttggtctacttcatcatattgcctcacccatggaccataaatcaaagaaaattagttgcatcatggccggtagcataaatttctataataattagcaatttttaattgaaaaataaatgaataattttaagagtgaaagtaaataataaattattgctaaaaattatattttgaatgtttaaatatggtcagtttaaaaatataaaaaagattccctaaaaaaaattagaaagtgaaaaaagttaagaacaagttataaagtccgtacattttcatcctaggttagttgttataagatctttaatatatcattaaaaaaacacaagtgacttaataggagtgaatcacatgtcttataaaaaattataatcttaactaattaaaaatgattttaaatataacttttaaaata

SEQ ID NO: 373 - DNA, 14252 bp, Glycine max
tttacactccagctctgcgagatcgtcaacgacgttgcaccgcacgccgacggcctccgatgttgtcgttggccgggtaacaccactctgataattataacgatgattccgattaagtttctctgccattttggaaatctagatatcaccataacagcattccacagtgaaacccaaagccaacaaacaagataaatacaacaaataaaagaaaagaaaaaaaaatgtgacatcaaaatcaacggttgccgccggtggaaggagcggatctcagatctggaatgaaaaattcaaaataaataaaggagtgaagcggtggagcagatctcacatacatttgaggaaataaaacccaaaaattgaaagagaggacaacagttgcagaggttgttttttaatttttttattaatttttctttcggttaaaaatttgttattacagttccgaacttcaccctagaaccctggttcacggtagaatttgccaccaaaataaataaataatattatttttttcctttaaaagctaaacgaatggatatacgtccttatccacataggaaaatagcacaagccaataaaattcgatattttgatccacacggtaggtctaaatcctgtttcggattattcatacgtgggcaaacttacaacatacacaccacctaggatttatgaccacaattaaggtacgaaaaatgagtatgtcacagtcacccaacactagcaaccactgagttcacccctcaaacgttaattaattacaaggcttatgtctattttcagtatttttgacatcttcgttctcctgatttttgttggctttaactttaaaccaccaattctgttccccttgtttcttcatcattagattttaagtgccatgcattgatataatataaatatataacttcatttaattaatgcaagctattgagttttgagtcgaatctattagccacaaaacacacacacacatattctcacacaaactgcaaccatggctactaccttatgttacaattctcttaacccttcaacaaccgttttctcaagaacccatttctcagttcccttgaataaagagcttccactggatgcttcaccttttgttgttggctataactgtggtgtaggatgcagaacaaggaagcaaaggaagaaagtgatgcatgtgaagtgtgcagtggtggaggctccaccaggtgtttcaccctcagcaaaagatgggaatggaaccaccccttcgaagaagcagcttcgtatacttgtggctggtggagggattggagggttggtttttgctttggctgcaaagagaaaggggtttgaggtgatggtgtttgagaaggacttgagtgctataagaggggagggacagtataggggtccaattcagattcagagcaatgctttggctgctttggaagctattgattcagaggttgctgatgaagttatgagagttggttgcatcactggtgatagaatcaatggacttgtagatggggtttctggttcttggtaagtttaaaggttaagtacatatttgaattgaatcagtgatttgattgtcttttttctttttctttttttctttcttgttctatttttaggcatgcaatagggatactcatgctgattggtttaatatatcatttaaggtgttggaccctcaaaagctaattaggtagtttcaaccttgtggtaagtggcaactgtactcatttttggcaaatttaggacagagaaattctagcaatgagaaaagtacatggttaagggaaaagagtatattaaattattaatatcaattgagaactttgagttgacaaacttcaatatcatgaccgttgcaagaagtgccctagtaaaaaaactgtgaaatcttaacaacagcagcagggagtcaaacgcaactgcaatggaaattcagatgtttaacaatgtttgtgtcagtggtcctagttaacaagtctattaacatcctgtttgttaatgagtttgattactcttagtgagtacatccttcattttaaagttgggggaacttgggcttaataggattctgtagaactaaactaaccaaataattattctagcaaacatgcaaatgggtgttctgttattgtaaattttcctttctttcacaaacaacaatcttatttccttactatcaagttataaaaaaaaatgttttcttctattttctgtatgaaattttagcatttggtaccgtgaattgatatataggttgttgtcaggtacgtcaagtttgatacattcactcctgcagtggaacgtgggcttcctgtcacaagagttattagtcgaatggttttacaagagatccttgctcgcgcagttggggaagatatcattatgaatgccagtaatgttgttaattttgtggatgatggaaacaaggtaattagagaaagattgttaaagattctcctcatatttctgtctattatgatatctattttctgatgcttttatttctttcttattgaaatttgaaaacgcattggcagacaaatatcatttgattgatgtttactactttcccaccctgcattccacaatttcaggtaacagtagagctagagaatggtcagaaatatgaaggagatgtcttggttggagcggatggaatatggtccaaggtcttattaatttttctctgattatgatcttattctttagcaaataatttttcccatatgaaagtaaacatcatactgaaacatgacaagtactgtggagctcatatgtgtgttagatttgttctttcattgtgaagtagtgaactctttctgtcattctgtctgtaagcggttcgtataatcataaattctgcatttaattttattgtaattttttatgaataggtgaggaagcagttatttgggctcacagaagctgtttactctggttatacttgttatactggcattgcagattttgtgcctgctgacattgaaactgttgggtatgttgattatattcatgtatcgtatctctatttatccattttctgtggactatgttgaaattttgtaaacattacttacattgagttgagaagcttacttgaacttcttcgctggaagataccgagtattcttgggacacaaacaatactttgtatcttcagatgttggtgcgggaaagatgcaatggtatgcatttcacaaagaacctcctggtggtgttgatgagcccaacggtatgcattctctttgtgtttgagatttgaaaacagttagaagcacaccctttgcaaatgttaaattttcaatgtggtctacttatagacatacctttttaattgtttgtgttggcttttacataactgatgccgttttttaattgattgtacctggaaagaattttcaactgttatggtaatgaataattgattatttgtttgacattttgagcttagatcatttctatgctgaggatcactgattattatgttctgccactagttactactaataatgaacaattagtgggggttatatatgaaaaacgaaaaaaaaaggtaaagaaagctgctcatggcatcatctatttgtcggaatagaaggtattttattcaccttgttattcttgagtcatttacacagtataaatagatacaagagagagagagagagagtttaggggttgtcctagcctatacatgatactgatggctaaatataactaaatttgacccttgatctaagggatttgacagctatttacaattaatgttcttattttctggtaattctaatgactcgcgctaacactctccctcaagttagtacataaatgtctttaatgtccaacttgtcaagggagtcagggaagttcttatcggacactacctttgtaagaatgtctgtcaattggtcttccgacttgacaaacggaaatcaaataatcttcttgtcaagattttgcttgatgaaatgtctatctacctccaggtgctttgtttgatcatgctggatagaattttgtgagatatcaattgtatctttattgtcagagaacaagttcatctccatgctaggaccaaagccaatctccattagtaaccttttgagccataatagttcacaaagtcctttggtcatgcccctaaacttagcttcagcactagacaaggccactactttttgctttttacttctttgtgtaactaaattcccttccacaaatgtgaagtatcttgatgtggattttctgtctataacattccttgcccaatttgcatcagtgtacccttcaacactcaagtgattattcttagagaacatcaacccctttcttggtgaggattttaaatagcgaagtatttagtttattgcatctgtatgttcttcacttggattatgcataaattggctcaccacacttacggcataggcaatatcaaggtgagtatgtgacaaatagataagtttccccaccaatttttggtatcttcctttattcatgtgcacttggtctgtgtattgagaaagtttgtgattttggattgttggagtatctgttggtttgcagtccagcagccccaccttagtcaataagtcaaacacctactttctttgatacaagaaaatgcctttttgtgaccttgccacctttttccccaaaaaaatacttgaagtccacccaaattcttcatctcaaactcagttgtcaattgctcttgtagtcttgaaatttcttcgatatcatctccaataataatcatgtcatctacgtaaataattacagttgtcacatttccttgcagatgctttaagaatagggtgtgatttgaattactttgatcaaaatcataccttctcatagttgagctaaatcttccaaaccatgatcgaggttattctttcaatccatatagtgcttgctctaacttgcataccaccttggttccagaagagggcatatagctcgatgggatatctatataaacatcttcttcaagatctccatggagaaaagcgttcttcacgtcaacctgaagtaatgaccaatctaaatttgttgcaagagataataggactctaacaatatttagcttggccaacggtgaaaaagtctctgtataatctataccttaagtctatgtgaacccttttgccactagccttgccttgtgccgatcaatggatccatcacttttgtatttgattgagaacacccatttgcaccccaatatcttctttaccttaggaagtggtatcaaccttcatgaattattgttttgtaaagcttccatttcctcttgtatggctagtgcccacttaggatcagctaaggtttcttccacattttttggaatatgacaggataataatgtctttatgaaggcatgaataggatttgataaatgttgagtagacacataatttgcaatggggtatttggatcgcctttcttctacattagggcagtatctattgggtggctttcctcgattgttcctgataggcaatacatatcttacagaagcattagtagatgaggagatagtaggagagcttacctcaggattgttccaagtgagagggtcgggtattatgaaaagagggggctcttgacttccttgatcgatatagtcttcattgacgggaacttcttcactagcagttccttcattagtagaaggatcctctttacactcaacttcagttatatttaaatgttgcatttctataggttcatcatggattactccttcaacttcagattcatgctctccaatttgtttcttttcaatagctggtgatggagccaccaagtaccaatttagctctctattcatggactccccttgaagagctgaattggataccataggagaaaagaaaggttcatattctagctaggaaagttacatccatggtgatataagttttttcgatggtagggtccaagcatttgtagcattttttgtgtagtccatagcccaaaaacaagcacctaacaacacatgcatcaagtttggtgcgttggtttttgtggagatgaacaaaaaccacacacacaaaaatcctaggttaaaacatcaacacagtaggtaattgtacatgagaagagagtacttgcagaggtgttttaaaatgcaagaccttggagggcatgcagttgaggaggtatacaactgcaattacagcatcatcccaatggtgagttggaacatgggtgcaaagaagaaaagcacgtgttgtctctaagatatgacgatttttttgttcggcgacactattttgttgtggagtttgtgagcatgaggtctcctgaaagagaccatgttgttgggattatgctttgaaatgatggttaacaaactccattatatgaccgaagaacttgaattttggttgaaaactgattttgaatcatgatatgaaaattctgaaatatttgaaacacctcatctttagtcttcattaagtaaagccatgtcattcgtgtgcaatcatcgacaaatattacgaaccaacggtgaccaaatacgatagtcctaagggaaggtccccacacatcaaaatgttttagagcaaaaggaacactgcttttattcaaactcatacggtaggaggttctatggcttttagccaaaatacaagtcacacatgtaaacctaacatttttcaaatgtaaaaataaatatggaaataagtgtcttaaataactgaatgatggatgtcccaaatgacgatgccacaaccatatttctcattctttgctactagattgatggcacacgtgatgtgcttctcctttgctaaaattgtctaggtagtatagcccccctctcttagtaccacgcccaataatcttcttgttgagaacatcctgaagaaggaaaaaaagtagagtacatcaataccacataattgagctcttcagttatttgactcatagacattaatttattagataatgtaggaacgaggaaagtgtgagataaagagactgagggtgataatgccacagttccaacacctacgattggctatgcaactctatttgcattcgcaatgcaagtcctatgtggtggagttgactgggagaagttcatgggatcaaaggtcatatggtttgttgccccagagtcaataatccatgcacttgcatcctgagagttagaactacagaaaacttgacgccagttacctggtttcattgaggtggaggaactagttacaggacaaagcgagagttgagactcaacagtgactacaacagctttaccagtgccttcctcaagtgtcgtggtgtcttttttcttcttagcttgcaactcatgccactattttggatacccatgtagcttgaaacaggtatcacgattgtgtctaacatttccacaacgtgtgcactttcctccatcagatggacccttcgacttcaagactgagttgtgtttcccagccactagtgttggcaattggccaaattttgaacctttagtggccataatagcatcacttgttgtattatctaccccagatgccattatagtctaacaagtgtcctcccttcgaacatgtgcataagcatgctcgattgtgggaaatggcttcagttggagtatgtcactccaaatgttatcgagttggtcatccaatccattgagaaagatataaactctttcctcttgtagtaaataattgtatttttgtatatctcttgggcactccatggcattagggcaccgaaagtctatctcacgccacagcccttgtagaacattgtaatatttttcaattaatccacttttctacgacatctgggttaccttacgtcgaaggttcctaaagttgtgaagtatcagatccatcaaaatatgtcatagcaatggagtcccaaacccctttggctgttgggaagcggatgaaattccccaccagtgagggatccattgagttgatcaaccatcctttcactatagcgttctcagttcgccatttacagaatgtcgaatcaatttccgacgacaaagggaatgatccgtcaatatatcacagtttgtctttgcctgagatgtacatctcagccacctgggaccatagggcatagttggaaccatccaacttgatcctgatcgatatcgtcgaggaattagagattgacagttgtgatgttgactaggcttttgacaaaacctccatcatttttgtcgtaagatttgccaaaatggaatcggtagcggaagcatttgatggctactttgtggaatcaccaatcgctgaggaatcaaccatctttgggtcccaataatatgctcttgataccatgtcagaacataaggtattttattcaccttgttattcctttgagtcatttacagagtataaatagatacaagagggagagagcttaggagttgtcctagcctatacacgatactcatggctaaatataagtaaatttgacccttgatctaagagatttgacagctatttacaattaatgttcttattttctggtaattctaatgactcacgctaacattttttagcatttcaggaagcatgcttcatacctacaaaatactgatacttgcatttgtttcatgtatcgatattagacatgtatctgatattgatacttttggatacttcaccaataataagtatcagaaaactatcaagtgttagatttaactaactacatcaaatctcaattttaaagtgggtcacatttttactagttttaggaagaaatgaagtagctactattcttgtttgtaggaaataggctatgatttatgatgactatgattcatagtttctattttgtttttagtaatgttcaaaaagtgtgcttttagtttgaatttgtagagtaacaatgttatattatgtttaatattttatgcacacatgtatgtgtatcttctacattacgtatctgacattaagaataattgtatcatatccaatatgtatccatgcatcatagtagttagcatggtatttatttgagattacctcatgattgctttttgttaatattcaaagatggacctaaatgcttctctcgcccattctatctcagactcatttccttctattactgaatctttatccatctttcttgacgtggaatagaatggattgtaaatatcaagcattcaagctggtataatgatgaagattgctaatgaaatagcctgggttctatgacagtaatttagcattggaaatgtagaaataagatgaccttgaaaatatacaaatagatgtgtatctttatttttcatccttttcaatgaggaaaaaaaagttaaattatcatattcatatctaatttcttagttctttctgcatggcaggaaaaaaggaaaggttgcttaggatatttgagggctggtgtgataatgctgtagatctgatacttgccacagaagaagaagcaattctaagacgagacatatatgacaggataccaacattgacatggggaaagggtcgcgtgactttgcttggtgattccgtccatgccatgcagccaaatatgggccaaggagggtgcatggctattgaggtatatattctttttatctggtatttagcttattcatcctctctcaatgaaatatgaagttattatgagttctacattagtttcagaaattttttacttactcagaccaggaatggatgcaagaattgactaatgatgggggtggagggggaatacacaagataaacgaaaattcttagtttaaacatatgtatcatacatgttatttcatataataaatttcatctatgattgagttagtgtcaaatttttaaacaaagcaatgaaagactatttgtaccatatgactattatatcctccaagtcttggattgtttacatactgtttactcatccaaaattacaataagaatccacttttcattgatgtgaatctatttaagcttcctctttaaatattctctttttacctgtgggtcttcttacttataaaataaaaataaaaaattgttataaattataatgtattagcccattaaacacaaacttatcaaaactgattgtagaggctatttttgttttgcattaaaatttgattacctgtaatataaaatggaaatgtaataaggtcaatagggagactcctcggctctctctacctttgtccctctttcatacctaagacattatcactgattttctggactttggtatttgaaactttttcttaactttcttgtcgttaagctttctattattttttttcttggcacagctttcaaataaacaattttatttccatctgtctgatggatatacactatttacagaaacatacataaaattaaaatatttcctactttaagaggagatggagataatagatgtcaaactatctcaacttttgttagaggctcgaaagggactggtaatcaatgaaacacttgaaaagtgaggcaaaaactccttctgactagtttgttttatcatttcaggacagttatcaacttgcatgggagttggagaatgcatgggaacaaagtattaaatcagggagtccaattgacattgattcttccctaaggaggtaatataccattttgcatttatgcaaatgcaaatgatgatattattgacttgattcgaaaagagagatcgtttcttgcatcaaccatggctcaatagttaatgtttcattattggtttaaatacatttttgtttcttggaatttagtgatcttttgtttttcgttcttgtaaaaaaaaaaaaaatttcagtcattgtaaattatattatttttttgtttttagtctgtaaaatattttagatgacgttttgaacaataaaaaatgttatataaagtattataaggacgaaaaacaaatataatttgtaatgactaaaaaataattttttacaagaataaaaaaaaacgctaaattatcatgactgaaaagatatttaagcattcatcattttcaaattggtaaatttgatgataaatctctttggtgattaatggtgcccatcttttttatcccttttgcattaatactttcagctacgagagagaaagaagactacgagttgccattattcatggaatggctagaatggcggctctcatggcttccacttacaaggcatatctgggtgttggtcttggccctttagaagtaagaacttaaaatttatcaataagagaatgaaaaatatggtgaaatgacactcaaattgaaataattaaatgcacaaattcattcttgcttcccttactctgcagtttttgactaagtttcgtataccacatcctggaagagttggaggaaggttttttgttgacatcatgatgccttctatgttgagctgggtcttaggtggcaataggtaacgtttagagcctatttttctttgctcatagtctttctttcatattgtcttcatctgatcttcttattcacatgcatgtagaaatctgagccactggataaatgatgagaactaagaagttcaagaaattgataattgaaaacaatgtttagtctttacttggacaaacaataaagaaatatttatgtgtgcaattttgttactaacaacatgaaaaatgatgctacttttgcagcgacaaacttgagggcagaccactaagttgcaggctcacagacaaagtacgttgctcaaataaagtttcttttgtactttgttgctgagaagatattgtatatctggtaatttatatgttcacatctattagacttgttgtgatgttgttgttaatagctatttgattatttatgaaggcaaatgatcagttacgtagatggtttgaagatgatgaagcactcgagcgtgctattaatggagagtatgtctctgaccaaatatttgtatcacctattacatatttcttaccacaaataagtagatcacataacttaatgttcatccttgttttctcaattatagatggattttattaccgcatggagatggaacaggtctttcaaagcctatatctttaagtcgaaatgagatgaaacccttcataatcgggtatgcctattgctacacctacttacaatgcagtggcttaatagttcttaattatcataaagataatctaatttttggtcaccaattagtgttgagaagtgtgcagttcaattcctaattatcataaagataatctaattttcactttcagcctattttctaatatgtttttgtaattgtaggagtgcaccaatgcaagataattcaggcagttcagttacaatttcttcaccacaggtagcacaaatttatcattacctgaatgaaacacggtcccatacttgatgtgcttcacatcattaacataatcaacaatttctctttttaaggtttctccaacgcatgctcgaattaactataaggatggtgccttcttcttgattgatttacggagtgagcatggcacctggatcattgagtaagtaaaagaagtgaaaggttctttgtttgacattaaaagttttaaattcttgagaaatctatttaatatcattctcattatgttttcagcaacgaaggaaagcagtaccgggtacctcctaattatcctgctcgcatccgtccatctgatgttattcagtttggttctgagaaggtgagatgagaggtcctaaaaagcagttgcagtatactcatgttacacatttgcatcttctaggacttatattaggtatatgaggtaaccactgatcaacatatgagaaagatactacaactgtttgattcactaattatgactagtttctttcacagcctataagaattgaacattattagttggatgattcagtctcattgagtagtgttacttgtacacactttcatcccacactcaattgtttaaagtaaaattattagtttattgcattgtttaaccaataccgaaatttcagttgttaattttatttaaatacttgtgggagaggtgctaaaaaattattcaagttacatttgatttcacaattcccctcatttatctgagacaaatgattcacagacataatcttttgcgtatattatctgttatccttgcctgaaaatgttcaattttagtttaaatggtgcactacttatttgatgtctcagcaaccaagttatgtgcaggtttcgttccgtgttaaggtgacaagctctgttccaagagtctcagaaaatgaaagcacactagctttgcagggagtatgactgattctgctcaattgcaatttgtaagttatggaaaaattatacagcacaaatttgctattgtatagtactatctgcattgttttagggtggggtattataccacagtctagtcatttaagatctgatatgttacatgcctatatggacatttaagagggactcttgggtataaatttgttactccactccaatactttttgtgtatgacatttgtaatttgttagagttagatttataacatgacacacataaacttgcacgtgattaatgttgaatggagtaagcaatgcctagctatgaatttttgcacttttaattgtgatttacagaatcaaactgtatagtttatcattataagaagagcaaattcaattgtcaccaaatttaacagatatagttcaattggttgaacatgtgagttgttgtaaacttcgtgtgacctaattttgattcctacaaatcaaaaaaaaaaaattgtcatcaatctctttctaactcctcctgagtgatctgagttctgtttattattgctcctcgtatgttgtaaccaagttttgatggtaatttttcctaacattacaaacgaggatgcaaatatctcatatctatattagacaaagaaatgtagttactagcatcttagcttaggtgagaattgtcattgtatgtcttgtcgttgtgtccattgtccagcatcaattttcacatataaaacaagaaaaaaaaaacacaaaatttgttctatagtaggctgacttgttcacgccattcatgttgttcattccaatatgggagatattgatggaaccatactatgagagaagcaaatcaacctgcggatgaaggtgtttaccatatttttgcttttgctcttgattttatattgcctgctttaagagctgatatggctcaagtttgtttttctagagtcttctagtgctctttcttttgatgtaattcacccaaaaaaaaaaaaaatagtaggccaacttgttgt

SEQ ID NO: 374 - DNA, 3612 bp, Glycine max
ccacggatcagagcaggcccataaactgccaatctaggcctgatccatcttcaggccctgcttattggacttttaaataaactagttatcttttttttttttttggtgaagtcgtttataaattttatatattcaatccgtccagtgtccagattgagttttcagtttttacttcagacgcgtctaaaataataagaaaaagtgaggagggtttgcatgagtggaacatttcacaagtataattgtcattgaaatagatctagttacaattacaaaactatgattaagttgataaatgaagctttcattttttttcctaaccctcaaattcatcacgaaaatgatccactaatttagtgttcagttaagaaataaataaaatcaaacaaaaaattattttcaccaaagctcaaataatattcgaataaaaaaaactttcatatgaattattctatccaaaacgatgtgttttaaaatcctgaactatttgtattatttccttacccataataatatattttcacgtgcattaacctttattttagagaaattttttatcctacgataattaattaatatttttttactaggaactaggaatatccattgcacttgcttgacgtgtcaattcaggatttgtcgagtcgagattttcttgtccaatcctcctaccagctagtgactaacttgcacgttcagattctggaccgcataaaaccccagttagaatttggaagaatctagacacatcccttgtcctaattattaagctgccattgcttttaaaaaactccagcttgatttatgtttttattttcttttttaagaaaatgtaaactaaaccgaagaaattaaaatagagagaaagaaatccaatagagtgagtgagtgtactaactactaagtttgaggcatgaaatgaaaggacccaaatattatttcatcataatacttcaaattaaaacattatcaccatacccacaaatagtgtgggagacgtggtcactctagttgcctgtcatcaactattacaccacatccacacccttgttaacttaaagatgttattcccattctatcacattttggtaatctcttaacatatagaacactaccctgaacatagtaaagaagccagtgctaggatttgttagtgaagcaatggctcaaaccatgttgctcatgtctagtgtctctagcagttattccgtggatttgaagaaagaccttttcctccaattgcagagtcaaagtttaaggcctaagttctctcagctctcattcaacccacttccatcatcaacttcttccttttcttcaccccgtacattcacaactctggccctcttcaaatctaagaccaaagccgctcctgctaagactaaggtactctttttccatattttataaaaggaaacttgtgtctaatctaataatgcttcatttttcagcacactgaatttggtttcacgatatattgcaggttacaaagccaaagcaaaaggttgaagatggtatctttggcacttctggaggatttggttttactaagcagaacgagctctttgtgggtcgtgttgctatgcttggttttgcagtgagtaaatcttagcttataaactccttaattatcacatcacaggagaattgagcgtatttgattagttcggaagatttataaaaatatactcttttaaatcaagttgattttgaatttgcaccacaagcattaacaaaatgttgcattaatttgcaggcatcactgttgggtgaaggaataactgggaaaggaattctagcacaattgaatctggaaactggaattcccctttatgaagcggagcctcttcttctgtttttcatcctcttcaccctgctaggagccattggaggtttaggtgaccgtggaaaatttgttgatgacgaacctactactggaggtgttattcctccaggcaaaggcttcagggaagctcttggtcttggttcaggtacttaaatttttaatttcttaactttataaaagagtagtgattagtagttaagtctaaatgaatgtgtttatatacaattatcaatatgtaattgtaatactaatagctaaatgtgtctcacaaattattaataatatcataaaaatcttattgaaatgtctaagtagcataaagttgctttttaatactatatatacatcatcatagtctaaattggttacatttttcataatataaaacttgggttttggcatttttcaggtcctttatttggattcacgaaagcaaacgagctatttgtgggaagattggctcaattgggtttcgttttctcattgattggagaaattataaccggaaagggagcactagcccaactcaacattgagactggggtaccaatcaacgaaatcgagcccctagtgttgttcaatgttcttttcttcttcattgctgctttgaatcctggaactggcaaattcgttacagatgagggggaggatgattagacactaacccttttgtttgtttgtgtttaaacaaatactcgtttgctcatctatcataaaatgcattgagttcatcataaacaacaaatctatatgatttttctccatagttgcacgcgtcatgattagacattattttttgctttggtaaattaaaatcatagtgcttcgatttgccagtaaaaaatcataatggaactcaaattagaacgcccatgttctatataaaatctaatggggtaaatgaaatgagatatcattccgcgtgattgaagaaagtgagaagatattagtattgggatcataatacgtataatcaatttttaatgttaaacccactttcaagttgcatttaactattcaaaattaattagtatattaaaattagattccagtaatattgcatgtccagtgaggagtgtggctgcttctggaaggacatttcgttgtataatagatgatttagaattgccttttaattaactttataatttatcgcccataaacagacttatgaaaacggacttttggaagttgttccgttagtcatcgttatactattcgttgatcgttgacccggcggtatctacttcatatacacgtgtcaccaaacaggcttacttgggagttgggagtttactattgcctttgtgtcggcgcaacatgacaacatggtttttttaccatttggtaatttttttcaaaattatcaaacggagacgtttttgaattaataaaccatttaggatacttgctaaaagtagttacgatcttctaatcacaagttataaatctttatataatttcaattttaaaagatatggtattatagttagaagtcatataaagatttataatttttatttataaagtcataattatttttatgactgatctttaaataagaattaattaaaaaatatttctatttgataatttaaaactcataataaaaaaaagtttgataacacagaatattattagataatagtatttttttcttcttctttgttttgactttcgacgtactagatataaaataatgtttggtctacttcctcttatagcctcacccatggaccataaataaaagaaaattagttgcatca

SEQ ID NO: 375 - DNA, 8043 bp, Glycine max
cccgtttgcacagaattcatagactaaatatctctcatccccttctatgcagcatccaaagaggcaaaccaggttaggatggcgaagccttgaaagaccttcaacttctcgagtgaaagactcagaggtgttactctttgttaaatgcttgatggccacgagttgaccacttgggagaatacctctatacacctgccctgcactcccacgtccaaggcatatcttttcaccgccataattcatggcattctcaatttcccttttgcagaaccagtacaatccagaccacgcagcgatctctttcaagtttgcctgtctacgaagcttcttcttggacaaacgttttaccattataaccacaagcaatattgcaaggataactaccggcacactcaacaaggatttccacaatgatcctggggacccgaaaattgacattttttttgtcagtttcatttggctcaattctaaaacaaaaatgtttagaacttgaaaaaaataaaaaaaataaaatggtggagatggagctgaatactcttgtctgatccagaagctgaaggtggcaagcagcgtaagactttgtcaacggcaggatcatttggtttcccagctgcaacagcaacaatagctgctaccgcacatatggctacctcagtgtggttgttgttgttgttggtcacttgattatataaactatctcttaagcttaatattgcaccggtgcaatctgcacaagattcaccaaatgggtggtcgaagttggagcacttgtctaatgcatcttggtactgttgcagtttcctaacatcctggaaaacgaggttggagcatttggaactgccaaggtacaagctttgaaagccgcatgaattaagggacattccttgctgcgggtgaaatgtcttggcacaactctgcgactaatcttgggaaatgaacacttgtcctcctgagttcaggggttgcgatgccaacgcattcgacaaaaccgtcagagcatttcgacagcacaaggttgtcgggaacccatcgtcaccccacttgtctaaaacctcattcacatcgccgcactcaccaaatgccacatattgggacgtgttgaacttcagcacacatgtacctgcaccacagcaccagtaagttggtgcaaactactcaaactctattatattgtatggtctaatctaattttgagttttctcagtgttattgctatggactatatatcaccaactttaataagcttttggttgtatttctagataatatatttatgaacatattctctgtcacacttcttttaccataatcgattgaaaactataaaattacataacagacttgctagataagataattgagattcattttaataaataataataaagagtacaatgatatatgcataacataaaatgtgtaacttattaaaggataaaattaaacgctaatatactagaaaagagtaggcattgcatgaaagaagagggaagagaaatggatttgaccttgtggaggatcattgggtgctggcgatacgagtggggaaaactctgcaggtgttgctaggaataaaaatgcaaacgaaaggtaccaaggtaaatgggtttttattttcatgtccaaaccaaaggtctattacccgccacagaagttaaattaacccattgtgaagcagcgtaacgttgatggcagagcaaccaaattttttccgtgagatgagcggaatagagcagatatagtgtcatttttcctcgtgaattccgttaggggtgtggatattcccgcttacatactgccctcagattacagcttgtgttttatgccttgctataatcactaaatcttatataagttataacatttcacatttttaaatgatattctttttatgccccttggccaactatccatggcttagattgaataatagttctattacactgttaagtattcaaaatgcatttgagtttttatcttacttttaaaaattaattgtcaccttgtttatgtattttagggaaagcattttcttagctgtacaataacatcgcaattaccacaacaatactgctgtattcattatcacaagcagcttagtatttctgccttatccatttatcctatcgtgttttatcatgactttgtttactatgatgcaggtacttcaggttttttttttaaaaaaaaacagtaaatactttttctaacacacttaagagagtaaatgaacaaaatgcatcgtcaattatagcccaacaagttatcaatgaaccaaaattacaaaaggaaaaaaaggatttagccatcaataattgttaaatatgttgcactcttgattagctttttgttttaaccttgtttccgtgtaattttcgcatatgataaatgttactaatacactctttaaaacacttattttaattaacacgttctttgttattaatagttaaaatttgttgaaaattataaaattataattggagattataaaatatgaagtgagagacacaaaaatttatagtttttaataaatttcagtcaagtcaaaataatatgttcattgtattgaaaaaaaacaaagaaatatcatgcatttaaaagaatgtattaaagattgttttattagcatttatctttcaactttctttttgttttgtaagcaactatgttttgtattttatcatctcaattctctcttttgatacaagaggaatcagattttttgtttctctctgttttatttgtcagcatgtcattggtacctatttgatcactaaaatcacttttagtgatgatgtatgcttccttccaaagtttaacatttttttctattctctattattcatatttctgtctattaaataagtttaatgaaaaaaggaaaaactcaaagtaaatgtgtttaagtataattccttttttcagttaaaaaaaagtataattccttttttttctttatatatcttagaccgaaattccttaccgccaaatttctgaaatttactagggtgagttcctttttttatcagtaatattttattgaagagatatacttataaatataaaatcccttgttttatcaggacaataatagtattttattgaagagatataatcataaaatgaaaaataagaaagaaggttttagttctgatgattttcatttttgttttgtactagtattgtgaagtgggccttgacagaaggtattggacttggaaatgttgagtccatttaaaaggaaattggaagcaagttgaagcgtcaacgtgtctgctgtggttgcagtgacgggtctgtttgcagtccacacgaacaccatcatcattatgttcttatctcactcatgcgatggcgactcttgtttcttcttcttcctcttccttttacatttccttattctatttctcattgtacctgcaattggcctcttctacgttgcaaggcatgtttcccactttgctcattctaaaccatatctctgctcttaattactattattatcatattagcatactatatataatctaaattttggaacttgactaataaaaacaagtgggtatgcaatatcctaggacaattatattttccttttatgttagattttttaacataccattctaaatgatatgcagttgatcttgctgatttgtttttgacagtatcaggttacatttggaggtgaggacatacatatacatatattattattattgttactattattattaggttatatgtatatatggcaatgtggggtggacactcaatgttgttaaccaatggggaaggcacaggcactcccaatgtacgtataaaagcaggccttacggttagaggtgatttaaggtttcacagaacagcagggtttaaatatggtcctagtgtggtagtgctcaaagttttttccaccgccaaaaggccaacacgcttgcgcttgataagaccttattgcagtttgaggggacaacacaaccaagggaaaggatattcttctctcacttctacacaaaaaccacgggtaagcaactgctgcttagtttatcctacttcattgttcatgcaatcatgcttaccccttgtgtgaaaatgcaaatttttttcctaagatgacacctttatatccaatgtccatcttctgagtttactttacaccttgtttggatagcaactgatgttgaaattcgaggcagatcgaatgcttgtttttctcaaagattggagtaatatacgcatcacggcagtagctgccatattggtatccattttaatgatcattccaccagctgatgctgttgatgctctcaaaacttgtgcttgcttgttgaaggattgcaggtatgccatctttctttatcttgtccttgttctgccatgacaacatattatggcctccaatttcatactcttttgtccatgcaggatagaactagctaagtgtctttcaaacccatcttgtgcggccaatatcgcttgtcttcaaacttgcaacaatagacctgatgaaaccgaatgccaagttagtcttatgctttacatcaatttcatgcccgcaccattattcatgtctccaaaccctgcttatgaagcttctttttcttcttaactttttcagattaagtgtggggacctgttcgaaaatagtgtggttgatgaattcaatgagtgtgcagtctcacggaagaaatgtgtacctaagaagtctgatgtgggagaatttcctgctccaaatcctgatgtccttgttaatagctttaacattgctgatttcagtggcaagtggttcatcactagtggcttgaatcctaccttcgatacctttgactgccaattacatgaatttcacacagaatccaacaaacttgtgggtaatttgtcatggagaatacggactccagatgctggatttattactaggtctgctgagcagagatttgtacaagatccttcctatcctgggatcctttacaatcatgacaatgagtaccttcactatcaagatgactggtaatttcttactcgtaagctctcttttcaattgcaactacattggcgtgagggttgtgctagagccaaaataaaactagcttcctacttacttgtagagtaaagttgtagtgtaattaaggcacagaccaaatcgagtttcttaattaagttaggagagttagaaaagggtattttgatcattatcaggagataaaaaaatcagcaaacttgaataaaatgttattggtttgaagctcaacttaagaaattcacacacatggtaggattcatcacaaatcactatactgattctagatccaatcactgttaatggtttaattgtctactggaaaacaccctctgattcagtcaatgaatgacaacaccaatgttaaggtccagttgattccaatttaatcagaccacaaattcgttagtctagcctctaaacaaaattctgaaataaatttcaaaatttaatctgatttagttcaggcataatcatgcttgtaaacagatttgtaaaagaaggggaagtttgaatccaaaatagaattgagaacaagtctcagaatccacatcattagcttcctataacaatcaccaatggagaaactaaaaatgcataaaacgcaaacaaggagggaaaacctcgaatctgaaaggtcacaactacacaaatgatccaagtctattttcacattatgtttttcctcgtttataactaattctttcctaatcccaagattacccttatcccaactattagcccatggagtaagcttttcgacgatatctcatttacctaatttgggattaaattaaatgatatacgctcaaagacaaaagatatgtcatgcatgcatgcccaatacctctggtctaactctagctgaattttaacactgaaatgcccgaattggtcctttttacaaagtttgtagatctctttattaactttactagcacataaagaacatcataattagagatttatagcttaagttatgaccaaaatgcttttggcccaataattcaaattagtggtaggactaatcaatcaagaccaaaacctcataaacaaggtagttaaatgttactttccaagatcagaaaaagaatacaacatgttgttccttttacgtgtgcctacattaaatcatttcacatttgcaatatatttggattcaagagtcttatgttaacattagaagacttgcaaacaatgatacatacatatatatatatatatatgtaggtatattttgtcatccaagattgagaataagccagatgactacgtatttgtatactaccgaggcagaaatgatgcatgggatggttatggaggtgctgttatatacacaagaagtgcagttttgcctgaatctatagttcctgaacttgaaaaagcagctaagagtgtgggaagagactttagcacgttcatcaggacagataacacatgcgggccagagccttccctggtggaaaggctggagaaaaaggtagaggaaggagaagagaccattgtaagggaagttgaacagttagaagaagaggtggagaaggtggggaaaacggaggccaccttgtttcagaaattggcagaagggttcaaagtattccaagaagatgaggagaatttcttaagagggttatcaaaagaagaaatggagattcttgatgggctcaaaatggaagccggtgaagtagaaaagctctttggacgtgccttgccgataaggaaactaagataagcctgagaaccatgtccaagataacttgacatcataatctttttgatcatcttaaatttatctttgcttttattcattgactatatatattgcatggctttagaaatctttcctccctaatcattgcttttatgctgacatactaataattattcaaatattacgtaacagcttttatcaattgttgtatatatattcagagtattgtatttgcataggtttagatgcctgtgctctttttcagttgaaaatatttggattgggaattccgacatgaggaatgctgtattctaccagtgttcttcttcaactactaatgcataaccaccaatcatattaatcattgaaataaagcattcactaatttttatcagtatggtgttttataataaaaaaaagaagagttattcatacaacagttcaataatttatacaaacattttacctttatcttttctctcgtcacatcatttattacatctcatatttttctctcttttctctatttatcactcaattgtaagtacaatttgttgctcaatttatcatataatttattgtacaaataatatttctctgtagaagcatagtaaaacttttctttttagaatgacttgtgatgcggtagatgagacatcagttttctccattttcttttctggtagtatgctacgtgtctgagttcatttttctggaagaagtaaaatattgttgacagtacatatgaatttatagaaatgcatgggttgttcaactccgtaacacatggaccacaaaggaagagtcaatccaaagcaattgtcatgggcctaaactccaaattatcctagttagagccagtcagtgtcaaacaatggataggaattaggatggtggagtggagctttaacaaaagaaagggataatatcaatatggtagaggccctcaaatttccattgtccctgaagccaagtcatcaattatttctataaatgtaaaaaaatggaaaattagatagtatttgcacatttaaaatacttttagaattgaacaatcaatacggttataaaagtgaaaagtaactattttaagttaatatgcaataaccaatcttttattataaatgaaagacaacatttttcaatcagatgccattttttaaatcaaagagagagcagaacaatttcaaccagcaagaaacgtgagaggtgaacttaagtgccagtcgggtgtttaagatataatgcattttccttttcggatgattagatatttaatgcattttaaacggtgggacaaatctttcgt

SEQ ID NO: 376 - DNA, 9575 bp, Glycine max
aacattgaaacatttgattataaggaaaatccaaaaaaaaaaaataagaaggaaaatatttaaatatgttaaatgaattttgtaccttttttaattgataaagttaatgcaaaatcaaatacatttattatggcgacaaaatattaattatttctcaacagtttcctcaatgtacatattattaaattaccgcagatcaaattaaatccttgaatcattattaatttcactataaactatactcctttctttttataataagtgttatcccaacaaattatttctaagtgttatatttaaatttttaatataacattaattattatttttcagtaatatttataataaatatcattttagtttttgaatttaatcttaatacaattcttttttatctattttataaaattattattgtcttatgtctattcattaattcttattaatacgtgtaaaacaacatataccacttcttttgcgacgggagtagttgttattaatcaaaatgttatgtgacaattgacaaataacttgaattattttaatctggcggtgggtatcgatctatcagatgattgttatgtgggtgagcttataggatagagccacctgtaccacaattctggttccaaaatccaaaatctctgtcaagtcatttgaacccagccaataccaaattgccactgagttatcccacaaagtgccacatggctttgcgttttccatctttggtgaatgccaaacattttctgttctgtctctaaccccaaaaacgctgcaacaaatcaccacctttcccttcctttttcccccccttattagtgcctgcttctcttcttttttatattcatgcatatcatacgccttcacttcctcaacttcaagcaatgatctaatctttcactttttgcattccttcccttctcttgttgactttctgttgttagcttttcatcactcaatggctcctaccttgacatgcaactctttcaatcactcaatggcagttttctcaaaaacccatttctcaattcccatgttgaaagagctttcactggatacttcaccttgtgtcagtcatggaagcagaacaacaaagcaaaggaacacactgatgccaatcaaagcatcagtggcagaggttccccctgctgttaggaaaactgtggatgaaaatgaaggaggaggggatggtgcctctcagaagaagaagctcagggtacttgtggctggtggagggattggtggcttggtgtttgctttggctgcaaagaggaaagggtttgaagtggtggtgtttgagaaggatatgagtgctataagaggggaggggcagtataggggtccaattcagatacaaagcaatgctttggctgctttggaagctatagatttggaggttgctgaagaagttttgagagttggttgtatcacgggtgataggatcaatgggcttgtggatgggatttctggttcttggtaagttttaatttgaaacttgtacggtttcttctaattgttaatgttttggcatgggatacctgactggttttagtttatgatttatagatttgggtactaatagaccataaaaaaccaaattatttagcttcaacttactactgtgttgtgtgttcatccaagcgtcttgtttggtgacaatgttgtggtaaaacagaaactttaaaatttgactgcatcaaatgaatggttggcttattcagaggtgccactgcagcacaaattgggataattatgctattgtttctagtaaaaaactaatactaacatgttttccagtgggattgattaaaatatttagtctttatacattgcatgagtctggttaacatgtattttctgtttcatttgccacaaactacacttgaaaaatttgttcaatactctttgagataattcaggggtttggtgtagttgtgacaacctattagaagtgctagatagtaagttccacgcaagaactgaagtaattgcaggcagaatgataaagaaacctcacccgatgagtatattcatttagcgtcttaaaaataggataaagcaggttgcacaatatatatgcacagggttgttcttttagtgtaaagcagtactatttctttctcaaataggaatcttgcttcctaaatattttatatagttgaagacattttttaaggtttactttatgaaatttttagcatgtactatgcctaccatgaattgatacatagtttggtattaggtacatcaagtttgatacattcactcctgcagcagagcgtgggcttccagtcactagagttattagtcgaatggctttacaagaaattcttgctcatgcagttggggaagatgtcattatgaatgacagtaatgttgttgattttgttgatcatggagacaaggtaattaattaaagaaagcttttaagttgaagattctccctgtattgctatcatatgtattttttgaagactttctttcttcaagaacctgcaatggcagactaacgtgactaaacattgtttggtttatcacttgtgtcatcctgcatttctcaattgcaggtaacagtggagctggagaatggtcagaaatatgatggagatctattggttggagcagatgggatatggtccaaggtcattttaaattctcttggattccaagctttttgtttagcaaattatctttcccttgaagaaatgaatatttacttaacggagtgcatccgtgtaatttataaagtttcttatggtagaattatccttctaaaaaaagttggccatattacatttgatgtgtgtgtgtgcatgtgatgatgtgaatttgtttttcagctttgttcttcaaatgctgaactctttgtcatttggtttgttgagagcctttatggtcacaagtcataagtactgtttgttaacataatcttaaatggtatcattctgtgaataggtgaggaaaaagttatttggccaaacagaagctacttactctggctatacttgttacactggtattgcagattttgtgcctgcggacattgaatctgttgggtaagttggctgtgttcatgtcttgtatgcctatttatccatatttactggccttttttttgttactactacctttatcatgttgagaagcttacttaaatttccctactggaaggtaccgagtattcttaggacataaacaatactttgtatcttcggatgttggtgctggaaagatgcaatggtatggatttcaccaagaacctgctggtggtgctgatatccccaatggtaagtgatcttattgtgtttgagatttgatatctgtcagagcacagcctctacggatgttaagtattcttggtgctcctcttataaacaaggcataatatttgaatgaaaaaggctaacaacatactctttaaaatattcttgagactagagagtattattgtaagttcacactggtaattgaacttacaataaagagtattattaagaataactgtaaggtattcttaggaacatacaataaagaatactctctaaaatatctaaaattattaggaataatctttaggtattgtaagttcttaggactccacactcgtaattgaactaataaaggtactgataaaagtttgatggtccaactttggttgaatacagtaattgtggcactggacatatagaaatttgatgagaaaaaaagaagaaatatatctttatttttttcatgattgcctatctttatcatatctaactcttgaattctttctacatggcaggaaaaaaggaaagattgcttaagatattcaagggttggtgtgataacgtaattgatttgatacatgccacagaagaagaggcaattcttcgacgagacatatatgacaggacgccaacatttacatggggaaagggccatgtcaccttgcttggtgattctatccatgccatgcagccaaatatgggccaaggaggatgcatggctattgaggtataattgatatgttcttacatatttgttgtaaaattagcatttcataaattcttgacaacttaccttgtaccatacccaacaacttaccctaaaacttcatgaggtctatatattccttttcatcatttttttcctgtctattcttcccctactcagtgaaatatgaatttatttttgttctaacttcagcagtttcatacatatccaaacctaataaagttgtccaagttttctgggcttaggtattttagaattcagactttttctttttctttataattgtttaaacaactttttttttaccactgaaagacatatgcagaactaacccaaaaaaatgcataaaaatgaaaatattccttacttgtggatgaaatggacgtcaacaaagttaaactatctatgagactctcaaatgatgtggtgaagagcctttctaactaacttcttttttcattacaggacagttatcaacttgcattagagttggacaatgcatggcaacaaagtatcaaatcaggctctccaattgacattgattcttccttaaagaggtaaccaaacattcagctctcaaacatgctaatgaatgctgaattcgaatctaaagctacctactttataacaagtaccaaaattttggaactcatgagaggtaggcaaaacactaagaaatgttcatatcaaataatataaaaattaatgaagttggggacttgatatgaacagagagatgcttgcatatctcagccaatagtacagtagtaaatctgacatcattagcaaattggttatttgattataaatcttttttgatgactcatattacctgtatcttgctccctttccattgttgctttaagctatgagagagaaagaagattaagagttgccattgttcatggaatggctagaatggcagctatgatggcttccacctacaaggcatatcttggtgttggtcttgggccattagaggtagggactttagttttaaaaatgagatactgaagaatatagtgaaggtgacacctgtccacaaattcatggttgctttcatttgcagtttttgaccaagtttcggataccacatcctggaagagttggaggaaggttttttattgacaagatgatgcctttgatgttgaactgggtattaggtggcaataggtaatgatgaaaacccacatttaagatgcatgctttataactttcattatgaattactgaagttgttatacctggcagtattcttactccactcatttaagatgcatgttagaaatttgtgcaattttacttccatcatttacatgaaaatcggtgctactttgcagctccaaacttgaaggcagaccagtatgttgcaggctctcagacaaagtatgttgctcaaaatacagttacttttgcactttgttactaagaaatggtaactggtcttttattggtcatgtctgttagattttgttgtgatctagatatatttggtttgattttttatgaaggcaaacgaccagttacacagatggtttgaagacaatgatgcacttgagcgtgccattaatggagagtatgtctatggcccaatatgaatgaatatcatccttaggatgttgcaatccgtatctatgaatcacataactgttgtgtccatccatctgtaatttataggtggattttattaccatgtggagatgaagcaggtcctacaaaacctatatgtctaactcaagatgagatgaaaccctgcataatcgggtacgccttcagttgctcccacttacaatgtagttacataatcacatattctgatattgtatctattatgcaacacagtaaattctcaaaagttatatgtatcaccacacaagttcttcaaaaactttggtcaccaacttcgtctttcgaaaatcctttttgtaaccatcttagttcttaaaatttatgttatcaaattagtctatgaattatttaatttaatttttcatcacattagtctctcggtttttttcccccaccactttagttctgtatttttttttatcattgagggattaatttgtcacaaattaaatctttaagaaacttatatggcaacactttaaatcttcgaaaaactaatatgctgactaaattttttgaagtactcatgtggcaacacatgtgatgttgaaggattaaattgaggattcgttctatgaaatgaattttaacttaaagagaaagtgttgagaaatcatttgaattttttttatattcaatttaatgaaaatcttaagcacctgtcagattttggatgtatctttaaaagacaacagagttcttctcgctcaccagttattgttcactgtgttcattctcaattatcacaaaatcttttttttttggaataatacataaataagtccttgaaattacaaaattgtcattttagtgcctgaaattactacatgacggtcattttggttcccaacattacaaagacggtcatttgagttcctaaaatcgtaaatataaggaataatgattaatgtttgttaattttaggggagtagaacaaaatgtttgtaatttcagagattaaattaaccagtgctcataattgtagggactaatttagtgtgttatccttcttctttcgctctcaatccatgcttttgacacattatcgtgattgcaggagcatgcagcaaaaagatcatccaggcagttcaattataatacctttaccccaggtaacgaaatttatcatgagctgaactttacttggtttaacacataatggtcttcaacatcatgcaacaaagtttctattttaaaggtttctcaaatgcatgcaagaattaactataaggatggcgccttcttcttgactgatttgaggagtctacatggcacctggatcacagagtaagtaaaagaaatgtcaggctaatatttattctaagtttaaattcttgaaaatgtatatttaatttctctttcatcatattttcagcaatgaaggaagacggtacagggtgcctccaaattatcctgctcgcgtccgtccatctgatgtggttgagtttggttctgataaggtaatagactatccctatagaaaaaatactttcaatatacacatataggacattttgagaattaaagcttataaattataataggtgcctgcttataagaggaaagggtaacgaaacctttgactgcactaaatacaacaaagttttatacttagcgaaagcttaatcatggttaattcaggtgccgtagtcctgaaaacagcataacatgtaaataattgaacgttcttaggcctctacaaatcgattactggtacaggttaggtacacttggttggaaaaaaaaaattgtatgtggcttgaatacgactcaagtaagactacgtgtgacttgggctatacctagtatatgccttagggtggcttgacagttacgtatgccttggggtatagctagtatttccttattctcccctttctttcctcataatcaaacacagtgttaatgatggtaaattcagatgtaatagtactggaaacagcatgacatgtaaataattgaacattcttgtaacctacaaacatttaggttaggccactacatattaagtactggtacacgttaggtacacttgggtacttaccaggatgatttaaaaataaaaaataaaaaattctacttcgctgggatcctgtttgttagtaagagtaccgagtaattggagggtcattgtccttgtatagagttgaacaatgggctactcacattctgacatgcctaactaagggtcaaaggatcacaagaccttgaaacaatctggggaactatgtcttgggtcaggttccgtgatggtcaggcccatggttttggacttttggggcctggacttgcccaagtctggagggagattctgaggtggcctattgggcctggattcatattctgggtccagatccagaacattaatttttcttttttgatcttaagtttatatattaataatctgagtgggttggagagtcagtttatgtgactgcaaaagcatactttaatcaaaatatatactaaaagaatcagtcggtacctgcaaaaacagtgttactgatgcattcttagcttgtgcagaaatgttttacttccatttgtaatttgtttgttttcctatcaccaagtttcattatcatttgataagtgttacgcatacacaccttttatcactcacgattatttataataaaagtaaattgaattctttaatcagtgcacaaatttcagtagttaaatactttaactaaaataattttatgaggcgagtataaaaaaagtgtgtaaagtaacattttccttctctttatccaacatataaaaagtactactttcatgttcttgcttgtaaatatgcgagtttgcttcaaatggtgtatttttacggtgtctaagtatccaagttattttcactttgcaggcttcataccgtgttaaggtgacaagatctgcttcaagtgagtctgaaaaggaaggaacaaaactttatcagaaagtatgattacgattctgttcagtcacaatttgtcttataagttacagaaaagttgtacagcataaaagtcggagccgtagagccaacacctccattcctttagtgcagggtataatacactgccaatcatttaggatctgaacattttatacaaacttttgattgtgattaagagaatggaattacacctactgctggttcaataaaagaaaattgatttcatgtctccaatctctttgtatctttccttgatttgaatccaagtctttttacttgaatggcttagccaagttcatgacagatgtttatagcatggatggtgctcttatgttgcaatctaattctgttggcaatgttctcttttttatcaagagttgacatgagcaagcgttgtatatgattcccatttcctacatctatacttgacagacaaaaggcagacactagcattttatcatgaatgagatgtcattgtttctaggatactttattggataaggaatttcattgtataatgctttcatttcattgtcacacgtatgcactatatttcctgtgccagaataggatcatactgcaaaatttgaatcaactggtaggtctatattatttcgaagaggctgttgagggaaattattcagcaaacaaggtccaagttttgtctctgcagcgtgtggccgtatcaagtaacgatattcctttcgcagattcacattcacatatttgggacataatgtgaacaaataacgttttttattgcgcttgaattctaataatggtcaaaggttttttgtattttccatgaatcatgatgctttcggctctgtaatagacattctcagctggtttcggctttgtaaccaaacaaaatttgggtatgtcaggtgttgagcctgcgatccgtactcacctctttaggccttcctaatccatgggatagactgaagctagaaacatttgtcctcatcttcgtatgtgttatttcacaattctccttagacaatta

SEQ ID NO: 377 - DNA, 2896 bp, Glycine max; identical to SEQ ID NO: 236

SEQ ID NO: 378 - DNA, 6435 bp, Glycine max
tattttatttcaatataaatttgaattttagttcttatcctattgtgttatttatatcagacgctctaatttctaattattttaaatttgcatgtctacgttgaaatagaagttgggggacacatgaatgaatatgctgtccttcaaaactcgcatttgggttgctatgccctaaggacacctctgggttggttgtgttattgatatgatgattttagttttagtaccacacggagctagcgcaagaatacaattgataaacgattttgcaaaaaaaattagtgatggaaaataattgatacaaaatattttcggtgagagagaggaaaaaaaaagagaaataattccgttgtatgaaatgatagaagaaatataaaataattggaaattaaaaaaaaataaaaattaggtatagattcatgaatatcaacgttatttaaagataaagtcaccaaatcaatcatgaagaacccaagtcctaaagtctgcttctcagtgacaaaaaatatgaaaaacataggaaaacctatttgtattccaaccttacagatcatatacatcattagatgtttcaaaattgaatttatctataaaatgcacacgtagatataggtcgatttttaaatttcaataaattaagactataacacgtatatatattgaattaaaaatatttgaatttttatatataagttcgctttcaggaatcctacataagtttgctcctataataattaatgtttaatttaattaatcgaaagcaaaggtggcccaggggatatataaatataagtactctatactaaaccaaaggcagcttccaaaaaaaaatcacagaattttcgcagtccaagaagacacgcatcccaaaccgttttgatttggaacgtgtcacgctctaaatttgcatggcatattgtctttaactgagtcaatttcgcttaataaaacctctcttcactcctctgctttaccaacccaaccccctgttcctgtgtgtgtgagtgaccgagtgagtttgtttttctcagctgatatatatggcgcttgatcgctccattataagcaaaacgacgtggtacagcgtcgtattatggatgatggtggtgctggtgagagtgcacggtgcagccgcgaggccgaaccggaaggagtgggactcagtcataaagttaccgactgaaccggtggatgctgactcggatgaagtgggaacacgatgggcggttctcgtggctggttcaaacggctacggaaactacaggcatcaagtaagttaatttggtttcggtgtttttatttattttctaaaattaattaattagttttatgttttgagttgctctgtgtttttgatttatggatgttgtgatgaattgaattaaattaaaaacaggcagatgtgtgccatgcgtaccagttgctgataaaaggtggactaaaagaagagaacatagtggtgtttatgtacgatgacatagctaccaacgagttgaatcctagacatggagtcatcatcaaccaccctgagggagaagatctgtatgctggtgttcctaaggtgagtttttttttttttttttggttcattctctaacgtataatttaagctaacaaaattaagtgcttaaagagggatttccttagctgctgatttgttaattctgctaccatcgcatgtcattctttcttatttttggctactctcttttcttttcctttttgaaaataaagtggtgcaacatgtctgttcgggaacgtgcgatttagactctttttttttttatgtttttgaagtagagtaattatatatcaacgttaatttctcacaacatcctttgaacagggataaaaataggaagaaaatagagaggtatgtgaaataaaatggactatgcaatggagagacaaggaaaagaaaagtatagagtaaatactatctttttaaaacaaattaagctcatctagccccattagtcatgaaagttgattttataaaacaaaaacaaaaacttaagaagtataatattatgataaagttgtcttataaaacataataaagtaactaaacattaccttctttgtgtccttttaatgactaaaatttataatttaaaattcttttatacttttttaatgacttaatgggattaaaatcattagtaatggaataataaataacttttatttagaattttgataaaatcttattggtgtcaaatataaagtatttttagaaataaataaattgggggggtccatggccccccttacacaatactaagatccatactataacatttatgtcatggttggcctgtgagccggagcatcttgtaagttgaaattcttttttatggaaaggtacgttgatatcatatacttgactcgcgaatcaacttttttaagaagaaaaacaactccctttgaaactgttgttgctggtaattgaattaattagagaaattgtggtgcgtatccatcataatagagtaacttaaaatctaatatatttgaccagataaaagttactagaagagaacatttgttaacacaattattgcgttgttgatagacattagcggggtgagatgtcttgacaaataaaatagatgtgtaaaagtttgcgttcctgttgatgatattttccaaatagtaataatttgatggtcaattcataagctagcactagctacatggtctaaacagattagtcattaatcatcttagtatcaaatattaaaggggtagttacctatattattaagataattgcttcttttgtgttgttctcttctgttcattgaatctgtccctttgataggatgctttttttttttttaggattacaccggtgataatgtgacgacggagaacctctttgctgttattcttggagacaagagtaaattgaagggaggaagtggcaaagtgatcaacagcaaacccgaggacagaatatttatatactactctgatcatggaggtcctggaatacttggtgagtcaagaatgaatttttttttattccggttcttttagttcaatgatttaagtaaaaaacataaaaatcagatcctaaagactttttttctttcttgggttctaattatgaaccttcatactttagtcaagaaggtaaattttaatatgaatatagttgcataaaataaaattatctaagggtgtaaaaatcatcaatccagaactatgtttatatcagataaagacattaattatagcttattcatttcctatctgattgtagggatgccaaacatgccatacctttatgccatggattttattgatgtcttgaagaagaaacatgcatctggaagttacaaggagatggtaaaaaattcatttctctactatatcatgactggaaatgatgccactttacttatggtaagttattaaggagtgtgtgctactatgttggtcatgtaggttatatacgtggaagcttgtgaaagtgggagcgtgtttgagggtataatgcctaaggatctgaatatttatgtcacaactgcatcaaatgcacaagagaatagttggggaacttattgtcctggaatggatccttctccacctccagagtacatcacttgcctaggggatttgtacagcgttgcttggatggaagataggtaccaatatagtgttcttttgtgttcaacccatataccatgcttaatattctaatccaaatgattagaaacctgccaagatattataatcttaggtgaactaaataacactaattgtagtattctattttttttctctgtttgttgatcatgttttggcaccctaagcattaacttcccctctgtttgaatgatgaaactgacctgtggtacttgaattttctgtagtgaggctcacaatctaaaaagggaatccgtgaaacaacaatacaaatcggtaagatattttttaattaacttcaacattgtgcattttcaatatcaacatgaaaaaagaacgaaaaaacaaagctattattgtgcaggtaaagcaacggacttcaaatttcaacaactatgcgatgggttctcatgtgatgcaatatggtgataccaacatcacagctgaaaagctttatttataccaaggttttgatcctgccactgtgaacttccctccacaaaacggcaggctagaaactaaaatggaagttgttaaccaaagagatgcagaacttttgttcatgtggcaaatggtacggttattttcaccttatgtccttattttcaaatgatcaaaactcttgctcaaatactattactcttgtaataacatccatccataaaaattggttctttttacagtatcagagatcaaaccatcagtcagaaaataagacagacatcctcaaacaaattgcggagacagtgaagcataggaaacacatagatggtagcgtggaattgattggagttttactgtatggaccaggaaaaggttcttctgttctacaatccgtgagggctcctggttcgtcccttgttgatgactggacatgcctaaaatcaatggtaatcataaagaactgaatcttcttattccttttaacattcattgcacatgtgtttttctttcactgttttcttattgatcatgcacaagactagccaatctctgaagagagattggaccaatccctgtccaagaattggattgatgtacatattgcacacaaaaaaaatccatttagtgataatttagtttctacattttttaaatgaccaaatttagttttaaaaaatgtgtaaaatgttgtaacaaattagtctttgaacctttaagtcacttagtgtccgagttattctgaaactatactacttactgacaaattactgacaaattaatccgtgactaaattggtaatttcaaaaaatataggaaaaaattgtcaagcaaacacgaagcaaacacatagtttaggactaaataagctatttaccctattagtttaactattattgtacattgctattaagtattaactgattattgatatacaactttggttgcaggttcgggtgtttgaaactcactgtgggacactgactcagtatggcatgaaacacatgcgagcattcgccaacatttgcaacagtggcgtttctgaggcctccatggaagaggcttgtttggcagcctgtgaaggctacaatgctgggctattgcatccatcaaacagaggctacagtgcttgattttgggttttgtacacaaaagctttaaagcccggttgatgatgtaatatttctctattgcattctgcctactggtttctgctgcttgtgtcaaattttctctaaactagagtagcccaatagcatacgtgttatgtgcattggtcatgtatacaagtgtaatactaaaaccttctacataatataagattagttagtttacttgtctctattttcttaaactccgctccttcaaatcaagaagattttgttagttcttactctgatctgttactttcctttcatgaaattgattataaacaatataggtctaaaatttcgacgagaatagaaaaaaagagttacagtagatcagggtggattagcagtgattgtaatgaagcttgaactgttattgagtttaaattttctccgaaaattggtgtattagtgcttttacagtctgctatcactaactccatatccttagaatattcaataaccagtgacttggtttttttttttaaatatcaagcaattaataaaggaaaatttaattaaatatttatctggattatttattaaaaatagtacttgttaatttttttagatagatttaaaaaaatttagagtttttaccttttagggtataattaactttttcaaaccttgttttgttttttttgaaaggatttctaaccttcttaatcacctttgattttgcaaaatgaaaaaagacataaatgttatgagttgcatatttgtaaaatgaggatttgaactccttctctggtgtgctttataagctctatggggtttcaaccaagttcttgatcttttcaaaataatgatatattactgttacactagaggctagagcattgcttttaagaaaaaaaatatagtaattcacctgatttttcttttatctaaatttatatttttttcttattacttataacatttatcaccttttattcttctttttaattatatcacttataacatttattatttttattttaatcttttattatttattttttatttctctcatctttctacctcatctcattttagagtgaacgttaaccagcaaccttagtttaatatttacatgacatatatgatatctttagtgtaaaatttataaatttaaaatatgcacaattttattatataaaaaatagataaaaacaccccatttcattcaattcacctaataatg

SEQ ID NO: 379 - DNA, 4265 bp, Glycine max
ggagatatttttttaacaaatataaaaatttagttggacttaaagacattttatatctatattttgatttaaatggacacacattcaaaaataaatataataagaaaatcattatatctatatgtacgaaactgagaggcttaaatacattgatctaatatattcaatatgaattgacagatcgtaattaataagaatgtactcttgaaaattgtcgtctttattttagtttcccatgtgcaacgaaataaaacaagataaagttgaatgcgtggaaagagtaaggaggtcccattggtaaaacacaggggaccataatcattaatatccctcgccaaacttgtgacagacagaacagcaaaaacagtatagtagaccctggtgttgctgcttagttgccattagaaatattatttgtagaacaattcgtacaaaaattatataattaagagaaaaataaaaagaataattttgtgaaattaaatttgactcaaatttaaatttcaatgataatattacggcttattagatcactcaatctccagactttttgcttgagaagaaaaaaatattttagagagagagagatggactagagatatgataaaaatgttcaaattcatattggaaaaagatacacgaacaacatagctgttctaataattcttatatctacatggcaatgaaattttgcagttgcccataatgtagccgttgatagagaagaaagctttttaggtcacgctgggccatggccatatatatgtgtctgtatgtatacacatgacatgtatatgaacaagtgccgttggaatggcgtggggccatgcaagcgaaatcaagctaagaggggcggcaaaaaattatgttaatcatgtcattgtccatacacaaaaacaaaacacacatagtttaattatttgattcattaccacagtctctctctctctctccctttctttcattacttaaataccaccctctttccactcaccccttcaatccactccactctagcacacaaaacttgctatagcagtaagctataactcatttgaggctctgtgagaattgagaaatggctaaagatgttgaggttcaagagcaaggaggagagtactctgccaaagactaccatgaccctcctccagcacctttgttcgacccagaggagctcacacagtggtccttctatagagccctcatcgctgagttcatagcaacccttctcttcctttatgtcactgtgctcaccattattggctacaaaaggcagactgatacaacggtaggtggcaccgactgtgatggggttggcattttgggcatcgcttgggcctttggtggcatgatcttcatccttgtttactgcaccgccggtatttcaggtatcacatcatcccttcaaaaaatatttcatatcaatgataacaaaaaatatttttttccctttatatcactagaaaaattaaaactagtgaagaaataatttatatatataaattttaaaaaaattggtcactataatttagtgacaccagagttgataaagaaaaaacagttcttttctccactaaacttagtcactgattcattgctttttagtagtgaaattatatagctaggaacattcatatctataaactatgaagcaacacaccatactattctactagttagaaggtaagatgttgaacgtgtattatatatgcatgcaagaagaaaatataattttgtggacttggtgtcgttgtaggaggacacataaacccggcggtgacattcgggttgttcctaggacgcaaggtgtcgttgataagggcgttgttgtacatggtggcacagtgtgccggtgctatctgtggtactggattggccaaggggttccaaaaagcatactacaacaggtatggaggtggtgccaactctgttgctgatggctacaacaatggtactgctttgggtgctgagattattggtaccttcgttcttgtctacactgtcttctctgccactgaccctaagaggaacgctagggattcccatgttcctgtaagcatacatacattatttaagaaaaattattactaccagcagtctttttttttttttaagaaacaaatcgtatattttttattattatttgtttcttataaaaaaaacgagagatgagatgtagtatagagtatgagactatcatagtttagataattttctaatccacataactatgttttatttgtaaattggaaataaaatagttgtgtgttgtttaaaaattattcgagactatagtggtctaatagtttctataataattttctatcattattaattcattataaatatcacctcttctatgcatctcttttctaatttatctctttgccttatgcaaaaaggtactggcgccacttcctattggatttgccgtgttcatggttcacttggctacaatcccaattactggtactggcattaacccagcaaggagtttcggagcagctgtaatctacaacgaagacaaaatctgggatgatcaggtaaacataatatccactcataaacttaacttattgtttcctttcccttattaaaaaaaaaatcatctgttttattaagagaatatatatttaaatacaaacatactattacttgttacattttttaccaaagaaaaataatgatgttgaaagtttgttatggatgctgatatggatgctgatggtggtctaattaattttggtgaattgtttcatgatcatcagtggatattctgggttggaccaattgttggagcagcagtggctgcattttaccaccaatacatccttagagcagcagctatcaaggctcttggatccttcaggagcaacgcttaattaattaatcaattaagctagctaccttgattaatttgccaacaagggctatgcatggtgtttcccccgaagaataataatttctatgttgaggagtgctagtgatctgtctatgcagttccctaatttaggctttttcgtcttttcctctcatcagctacagttgttgggggtgtttggaagagaaggccaaaaccatgggggcatgcatcaaattgtagataagcatgcttgtgtccaagggtgtattttgtatcccttttgtgtcttttctttttctttttcttttttttaatttccatgtatgtattccttgagtgttccttttctgtcttgtgcatccttagtcatttctcattttactcttcataattaagtactcatcttctcttgtttattaaagctttattaatcatcatctatgaatgtaatgtaccttgacttgagtaatatttatatatattatgttgcaggttttttattcacacggataagcttaatataagataaaataataagtgaaaccatactctttaattattctttcagtgatttattgccttatattttacctgctcattcgattgttaaaatactctaataacatgtacggaagagagtataacatatctttttgatttcaagtattcgaattgagggatagagtcagtgtttggttctcgatccaacttgcttccacacgaattttgagacaaatataacagtttaatgcaaactaaacacagaaaaaagagtctaaatgtttttgttaacgttgtctgcaccggcaaacgattacataaacatactctttttttttagaaaaatggaagcttctcgaattatatatacaagtctaattaatgaactttacttttggtttttctcttaaaattgagtgtgtcaccaccattaatcttaggcttggaatttcggacaatgtggacaagtgtccttttggaattaggccaaattcaatgtcctttaactactgagtaggctttacaagatcattcacccatttgcgtaacttgcgcttcttgaaccttcaaatttgtctgttaatcccccctaacattgtttataatagatttctgttgggatgcttatcctaatcctaatatatacataaactattgcgaatgtgtactagtggaagagcttaattagcacaataattaaattactattccacgcaaaagctcgcctctttattagataatctaacttggcttttgtggtggtggttctcggacgtgacatgaaatttggattgtttttgaaactcatcgctgttgctggggacactataagttaagtaatgaaaaagaaataaagaaagaaaaagtaaacatgttaggtggatatatgacttcggattcc

SEQ ID NO: 380 - DNA, 6261 bp, Glycine max
agaattacactagatgttacttttaaattaattgttataaaattcaataatgttatcatacataataattcataatttgactatacaaaaagtatttatattagtgtattttaattaataaaattctttataaattgataaagaataataagagtttaatttggatgcaaattaagttgaataaattttttatctgtcaatcaataaaaaaattattcttacaaacaattaaaaaatattgttatatgtgttttaagtacatagttactgtaaaaattaaaaattatgattatatataattaaataaaaaaaatcacatcattatcataaactatttactctatttttaaaaaaatcaaaaacatttttatcaaataagttttgtagattttacacttcaaagaaaatgttaaataataaacaatggcttcgttatatcactgctttttcacctagctcttccgtaagatgacattattaatgtattatgctacagaagtttttttttttcttttttattcataaatatgaatatatgattctttggttaggaaaactaaaaaatcttaccaacaaaggttgatatatgggataatgatttgtgtcttttaatcaaataatttagggtttgaaaattctgattgatcattaagtataaaataaattatacaacagttgacataagtgataatgacttgtaactcttaatcttaatcaagtgatttagagttaaaatttggattaatttttaagtatggaataaatgatgtccggagaaaaatatttaccttatgtgtttaagctacttttaataaggataactttataacactatcataattataaaaaaaaaaaaaaagaaaactagaaaacgcgtataggaagatatagttcaaagttggtacattcaaaaaagttgcacgtacgcgctatttgcaagattaatataatcagaaaaacaactactaaaaagcacgacgtgaaatttgaaagcacctttttccctctctctctctctctcttatatatatataggcaatggtaccaccaatccaaatcctcgatcctctatacctattctttcaatttgttcatcaatagcttcgttctactacttgataccttcctgttatattgctaattaggctttctctgatcaaaattaattaagaatgagcttgaaagctctttttgttgggtgcataatatggttgggtttggtagaattgtcaatcggaggaatagtgagacactacaagtttgatgtggagtacatgatcagaaaaccagattgcttggaacacgttctgatgggaatcaacggtcagtttccaggcccaactattagggctgaagttggtgacattcttgacattgctctcaccaacaagcttttcacggaaggaactgttattcactggcatggaatcagacaggtttgttcacttttgtttttcatgccattttggcctatcataatccattgacataaataacaacaatttgtgtttcttaacgaagtgatttaaaattcaaattttcattaatttttagatataaaataaatcgtattagaaaaaaatatttatttttatacgctcaagatttttaataaagatttatcactatgacaaaaacaatttcgtatcactatcatagttgcaaaaaaaaatcattttaaccttattttctaatcacatcaattaatataattttatatttataaggtctaaataaaaagtatgaattagtcattttgacctcatgcatattactcccaaaccccttattactaagcccgatccaattgatttttagttagtcattttatttgattcaatctaaaatatcttttgaattttttttttcacaaaaatgatcttcattaaagtgagttctaagataacattataacaatagaaacataatccattaatagcatattttttaccaggatagttttgaagaaaaaaaaactaaaaccaaatttaatactcttaattaaattaaccaaaaattttaatcatcataaattaattaattgaatcttataataagtactaaagctagtattatatttatctcttcttccatccttggtccactccataatagggaagacgttttatatattttccttttaattaacatgccgagtgctagctaactcaaaataccattttaaaagttttttctaatttatgttttcaggttggaactccttgggcagatggaactgcttccatctcacagtgtgctattaacccaggagaaacttttcattacaagtttacagttgacagggtaattacacttctctcatcatttcttctttttttttctacttttgatgatcttattaagaagaaacattaaactttaattaagtcatttgtataactgagtgaaagcataaaattgatgtcccatgtgtactcactactacaattaagtgttttaaaaatggttattggagacattctaccatagttttaaactgtttttttatttttgatcgagtcaaaagctcttattggtttccaaacattaaagtaagaaacaaaaaaaaatgtttttaaaaaacaactattttttcttttcattttatgtttttaatcaaataaaaaaaaaaatatcttcgttagtgttatctatttttatgtaacgatgtattcatggatattatatggtgcagcctggtacatatttctatcatggacaccatggtatgcaaagagcagctgggttgtatggttcattgatagtagatttgccaaagggacaaaacgaaccgtttcattacgatggtgaattcaaccttctttttagtgatttgtggcacacaagctcacatgaacaggaagttggcctctctacaaaaccactaaaatggattggtgaacctcaggtaattaactcgattaaattaacataaattctatttttcttctctttttttctttgcaaatcttatacataattgagttatcaataaaaagaataaaaaataaccttcactatatattccttaattatgtattgaaataagatgcaagcatatatatgtatatagttattactactttagcttgttctgtatactactttagtttgttcaataacaactcttaaattttgacaaattcaaacaagattctattattaatttttactgagtacataactaattattttcataactaacgtaagttttgtctctataattcatttaatctttatttctttgtatcttctaaaattccgtgaaataacttaaacttgaacatgtggcccatctgcgcaaagtggtaatgaatttttataatatagggcttctttaatcttcactccccaactgtttttcttttctgttgaatgataaaagaattaaatggtcgtaatttccactttttttagactctgctcatcaatggaagaggacagttcaattgttcccttgcttctaaattcatcaacaccaccctacccgagtgccaattcaaaggcggtgaagaatgtgcccctcagattcttcatgtggaaccaaacaagacctatagaatcaggattgcaagcaccacatccttagctgcactcaacttagccatttcggtgagttctatacgactctatatataatatgtttgcgtttaatttattattatctcccttttcctccctctatttaattttaaatttttatcgtctctttggattccaaatcttttgggtgcccattcaccatgccattgaataagcatccaagtgacaattagctgtcagatgagaccactttaaaatattcaatttattattctcacttttcacttaaatccaaatgatatcaactatagaaatccacgttaaatcatcgcatctattattgattgtttgttatgctaagaatagaataatttagggtatcatgtctaggtgttatgttaataaagacttaactattagttcaagaaagttagtaaatgatgtaaaacacaataaagatagacgatttcaagatcgatatatctttcatacataaaataaaagatttttagtagatgggaaaatccgtgatttcttatgttaagtccattaattaccactaccctcataatttctttgcgtgttgcagaatcacaaacttgttgtagtggaagctgatggaaactatgttacaccatttgcagttgatgacgtggacatttactctggcgagagttattcagtgcttcttcgcacagaccaagatccaaacaaaaattattggctttcaattggcgttagaggaagaaagcctagcacctcacaaggcctaaccattctaaactacaagacaatttctgcctcgatttttccaacttctccaccacccatcacacccctttggaatgattttgaacatagcaaagcattcaccaaaaaaatcatagccaagatggggaccccacaacctccaaagttatatgaccgaagggttttccttctaaacacccaaaatcgagttgatgggttcaccaaatggtccattaacaatgtgtcgctaacattgccaccaaccccttacttgggctccatcaagttcaaaataaacaatgcttttgaccaaacgcccccacctatgaatttcccacaagattatgacatctttaaccctcccgtgaaccctaatgcaacaattggcaatggggtgtacatgttcaaccttaacgaggttgttgatgtgatattgcaaaattcaaaccaattaagtgtgaatggtagcgagattcacccttggcacttgcacggacatgacttttgggttttgggatatggagaagggaaattcaaattaggtgatgagaagaaattcaatttgacacatgcaccattgaggaacaccgcagtgatatttccatatggttggactgccttaaggtttaaggctgacaacccaggagtttgggccttccattgtcacattgagcctcatttgcacatgggaatgggtgtgatttttgcggagggtgttcacaaagttgggaaaatcccaagagaagcactaacttgtggacttacaggaaagaagttagtagaaaatggacactactaaaactagtcatagtaccaacataaaataaatgttaaatggtatttatttaatttaatttttcaatgttcaactaatattacatttaaatttacatgttaacgtttatatatatgtataagcttaagattatgttgaataatgtcaacaccaattatatctcatttatctatatactatacatttcctactcgtttttggaaacttttgtcacatgtcaacttctggtgttataagtttttcatgtctcaacttttgatgcaattcattttggaacacttttttattccactatgttaagtcagactgttcaagatgacaaatacacaacagtaccgcatctaggatagtagggcattctaaatgaaatctgtcattagcatattgttgtatatgtacaatttgtgcataggctattagtataaaggtgtgttagtagtagcttagagaatactaagtgtagctaggagtggtaagaaagaatacttgtttgtaattgcaagttgattagtagaaccacttacaattggataaaggagaactggatgtagttcaagttgagtgaatcaatatcaatcaagtgtttctactcctcttccaagctttcctttagtatttcttaagcagctatttgacacattttgcacacaaatttttcatactttgttttcatataaaacctgttttattaaggattggacaacagttccatctgtttaagtaaaattgatatttgtcaatggaagagaggtgcaaaacctggttagacttgcacaacaataacatattgtggaaaaaggttatctaacacattattcacccacccacccccccacccccttctagtgtgatttctttgattagtctattaaaacacacaaaacacaaagattcatgctattttattggttagctcattaaataacataaatttgaattttgtttcctcttgtattttaatcatatacttagtcatgcaattaaaagaaaactatgacattatatgtagaattggatgtatcctaatatttatgagcgaatcaatataagtatgtgtgtgttgtcaaggacaaaaccaaatttttttttaggcaggtgaaattaatttaacatgtaataaaaaagttaacaatgatatatttactattgataattttttaaaatttagagta

SEQ ID NO: 381 - DNA, 5744 bp, Glycine max; identical to SEQ ID NO: 304

SEQ ID NO: 382 - DNA, 4375 bp, Glycine max
acccatcacgtatccagactatctaacccaagacgggcttgaccaatgcggaacaataaatccaaaaccaattttaaactttgatccaaggatttgttattataaacgataaaataactaaaaaaaattaaaatgtcacaaattacccgtcatatcattatttaacggatagacttaatggcagaaatcaaaaactaaacaaataatagcttaaggatcaaaaccggttaaataaaagtttaagattttgaaatgtatctaatttcatgtaaaatgacaatgattactttattttattagtctaatttctatttttcattttacttttatcaaaccaaaaaaaatacatttttaattaagacatataaaaagcctgaaggctgtccacagaacccacaatcaagtccatttaccccaatttaaataggctcaataaattgattgagttaaaaaattccacaatttaaataggctcaaaaaattaaaactcaaacattgcggactgcgagtgatgcggatcccgggtccaagccccaatgtttggcttacgagacacatgcttgcaatttcaatttttaaataacagggtgcacttcatctaatgaaattgccaccatgttaatatcccaattagtaaaaattaccttatttttaataaatagtatattttacaacattttaataaattatttaaaaatatataatttggttaaaacccttcccaagtcccaaccttagccgcaaaatccacatttggattcgttcaggccacacgagcaacaacaatacaagtatatccctcgtggcactgcaattcgaatcagcaagtaatcacagtcacaaaaaggaaaactatacgaagaagataagtgtgggaccaacagtatcacaaaccattccctgcctctcaatctctttgctctcagtgccttagaacacaatccatgtaaccaccactagcaccataccacactgccaaaatcaacaaaccaaaaaggtaaactttttgcaacaaccatggttgcaatggcagcagcaacagcatccacccagttgattttctcaaagccttgttccccttcacgtctatgccccttccaactatgtgtctttgacactaaacaagtgctatcaagtggcaggagaaggcatgtggggggttctggagttaggtgcatggctgtgggggaagcagcaaccactgggacaaagaagagaagtggatatgagcttcaaacactcactagctggttgctgaagcaggagcaagctggggtgattgatgcagaactcactattgtgctgtctagcatttccatggcatgcaaacagattgcttctttggtgcaaagagctaacatttccaacctcactggggttcaaggtgctgtcaatgttcaaggggaagaccagaaaaagcttgatgttgtttcaaatgaggtcagtgttgcaattgttgtactttacatgtttatagatcgtggtttgcagatgatcagttcatgattcgtgattggtcgtgatatgatcgttaaggaaaacaacaatctctaactcagtgggttggaggacactcctggtggcgtggtgtctgacccacaaccaaaagtgttgcaattacaatattccatggttttttttctagaattatatatatatgtagttggttcaattcagtgagcaattaatttttgtttttgcccaagttaaaattatgaaaacatgtatgatgtatcttgaagaactagattacaagggattgtttgtcaaagtttgtaaacaaatttatgggctgttgaatgtgaaggcttaattaggtaactatggttgacaagcaaggtattgtttttgcatttatcaggttttctcaaactgcttgaggtcaagtgggaggacagggataatagcatcagaggaggaagatgtgccagtggcagtagaagagagttattctggaaactacattgtggtgtttgacccacttgatgggtcatccaatattgatgctgcagtgtcaactgggtccatttttgggatatacagccccaatgatgagtgtcttgctgacattgatgatgaccccaccgtaagtcttccatggtttattatttcatttcagttaatcaaaggattgacaacggctcaaataaaatgagcctagaaaatctagtttcaaaggtaaggaggataattaggtttgactaaaagaaaactgaaaatcttggtttaaaaatgtgactaataaggtttaagaaaaaaaatggctgtgaatcaagtagaatatatacatcttactttagataaaagtaaattgccattcttctaattttcattttaatctctgtaagatgctaagataatgtaatcagaaagttactgaaaaaaaatatattgaaggttgactcaactagtaaaatcaagcatgtcaacataaagatattgaattgaattcttactagtggttcataacactaattcagacttgtaaaatattatctccaccctcccccttatacactatcttaaaaaggaagagttgaaaaaaaaaattgcaaaaacagattgttagtgaaattcagcgcttaatgttatgcatatgctaatttgcagcttgacacaacagaacaaagatgtattgtgaacgtgtgccaacctggaagcaaccttcttgcagctggttactgcatgtattctagctcaataatctttgttctcacacttggaaatggagtgtttgtgtttacattggacccgatgtatggcgaattcgttttgactcaggaaaacctccagatacctagagcaggcaaaatctatgcattcaatgaaggtaattatcagttgtgggatgagaagctaaagaaatatattgatgatctcaaggacccaggtccaagcggcaagccttattctgcaaggtacattggtagcttggtaggagatttccacaggacactgctatatggtggcatttacgggtaccccagggacaagaaaagcaagaatgggaaactaaggctcctgtatgaatgtgctcctatgagcttcattgtagaacaagctggtggaaaagggtcagatggccatcaaagaatactcgacattcaaccaacagaggtatgtatagatggaccttgtatgtctctaaatgctttagaagttaaggatgaatgttataatggatagttttattcattccttaacctttatggacagattcatcaacgtgtgccactgtacattgggagcgttgaagaggtagagaaggtggaaaagtacttggcttaaacgataagctaatgcaagaggtttacttgtgtatgaaaactatgcccaatcaaaacttccaaagcaatacaatcaggttttaaggaagaattctttttatacccccctccccctccgtccttttgtgcaaagaaaaaagtgatgccaacaatcttcatatcagtttgaacaagaattttgtataactttgaacatgtttcaaattggatataattttgttcattctggcaatatttctgccaagagaagcaatcatgtcagtaaatttcaaacccttctttctcactgataccaaatcatgtgaaatggttctagatgttaactaaatgactgttactacctattactttcgatgagaacttctggaggacttaagtatttaacgcaatcaaactctgggaaattttttactgtaagacatttgacatgaatttagatttgagcttatcagatattaccagatgaaacttgaaatttatgcaccgatgtattagcactacaactaaattaaagcaagtgctgactgattagggtcgaagagacaatatttaaactaatcaggaccaatgactaaatatatcatttaccaattggtatcttgttttcccgcaaactgttaacaaatacaaaacttggatgttttaaagtaaaataatcaccatatccatttaagattcttgaaaaaatttaaatcccagcatgtctagtctttcccttgcctcttccattgaaagtttaactgtcaccacatagatccagaaattgcttaaatgacttagacttcattacaaggctgttaaccataattgccatcaaaatgtaacccaactaagattaatccttacaataaaccaaaacaagggaggaagctatctacaatcattttttaagcttgaccaaataggctaagcttgtaaggtataaatgaatagcaggttatcattctaaattcagtgcaacagcagagagcaattctttggaacaatagatataaacatctcctgcagtgagctcacgttaataagtcaggctgagtcattcttcaaattgtcatttatgtacaattttcccaatccacagactactg

SEQ ID NO: 383 - DNA, 7152 bp, Glycine max; identical to SEQ ID NO: 359

SEQ ID NO: 384 - DNA, 3781 bp, Glycine max
atatatttttgataaatcaaattttacaataaataaaaaatattttaaatatataaattattaaattttataataaatacgtccgtactactatatatgaagtatactttagctttacaatgaataatttaaattctgaatctgatataagaaatattttaattattaataattttaaattttttttattaaaatgcaattaacacttggaagagatgagcatgtaagattcgcccaacaaaagatcacagatcacttgacgacttgacgtacgtacttgatgacaaaggttcaagtttatattattatctgttgagcggcgagttttaacaaccaaggtgttgtaggggggaaaaatattacatgattgaaaactattataattccaaataatcactacttgcagttaaatattattaatttgccaataaaatttaatcaggtgagaaacaaattcttatatatctcataataaaaatttcgtttaagttcatatgtgttggaataatttatttagctatagaatttgtgtttgatttatcttgtgtgtgtaaaattatttttggatcaatgacacactcgtatgtttgtacgagataaatttttaacctaatggaactaagaaaaatttgtggctcctgacccaaaacaaaaaaatatatatctaaatttgatttcaggtacccaaatgttgtttttttttataagtattcatttgtccttatcgaatgataactagcgagaacaactcagctcaactttgaatgataattttaagtgtctcctacagaaaatgattaaaacaagaaggatggtccaaaagtatctaataggccatctcgatctcatctgaccaagcttcctggttagttcctttgaattgaataatataaaaaaaagaagatgatggatgtgggtagagctcagtataacccacctacctccaattgctgacttttcaaaggccaaacatgaagaaatgttgcagtataaaaaggggtgcccttcagttatgtccatcaacaaatattggaatactacactatacttgtcaaccctttgagagttagaatggctgctgctattgaaatccccacaatagtgtttccaaactcctctgcccaacagaggatgccagtggttggaatgggatctgcccctgacttcacatgcaagaaagacacaaaggaggctatcattgaggccgtgaaacagggttacagacacttcgacactgctgctgcttatggctctgaacaggctctcggtgaagctctcaaggaagctatccatcttggcctcgtctcccgccaagacctctttgtcacttccaagctttgggtcaccgaaaatcatcctcatcttgtccttcctgctttgcgcaatcacttaagtgagcatttttttcacactaaaacttctttgattttaagtttgataattatttctcaatacaaaagcgatgttatatatgtttttatatgtggagctagccattagaaaataaattcaatactaattctcagttaagcaactttaagtaatatttgtgttcgatccaaaaattttcatttcagtgtttctccgcctaatttaattttaaaataaaaacattcaaacatatattatatcaattcaaaaatcagttccattcaaaattttgtcaactttcaaacaagtgtattctgacttctataaaagctctcttgtaaaagtttatatacatatataacttaattatatatgctataactctgtctgattcattttacttcaaatatatatatatatatatatatatatatatatatatatatatatatatatatatatatatatatatatatatatatatcaatgcttttacttacataaactttttgtcgtgcagaactcttcaactagagtacttggacctgtatctcatccactggcccctgagttctcagccagggaagttctcatttccaattgaagtagaagatctcttgccttttgacgtgaagggtgtgtgggaatccatggaagagtgccagaaacttggcctcaccaaagccattggagtcagcaacttctctgtcaagaagcttcagaatctgctctctgttgctaccatccgtcccgtggtcgatcaagtaagcctctctctctctctttctctgtgtgttgtatttagttttgtttatgcgaatggttgatgataagaagaattactactgttacaggtggagatgaaccttgcatggcaacagaagaagctaagagagttctgcaaagaaaatgggataatagtgactgcgttctctccactgaggaaaggtgcgagcaggggcccaaatgaagtgatggagaatgatgtgctgaaggagattgcagaggctcatgggaaatccatagcccaggtgagtctgagatggttgtacgaacaaggtgtgacatttgtgccaaagagctacgataaggagaggatgaaccagaatctgcacatctttgactgggcattgactgaacaagatcatcacaaaataagtcaaatcagccagagccgtttgatcagcggacccaccaaaccacaactcgctgatctctgggatgatcaaatataaactatttactactatgcagctcccactctatttttataatccatctttttacctcttgtttcattttacgtttaaataattcatgccatgccacttcttattttagatttcacaatcaataaactaggcacgcgcggcacatgatatgaataaactatgttcaatttttttttcttctcttagtccttctatttattaaaagaaaaaaaaatcttgattaattgaaattcgattaaaaaataagtaaaatttaataaaaaataatttccgtaaaaaattgaacctaaatattattaaaacaatttaactttaacttcagtgtattaattaattgtttaacccatttgcaatttgatcttaattactaatggatgatattgaaagatgattttacactaagattaagttaaatttatattaatctaattatacaatctatacactttgctgcaagtttctatggtaaaggcccaggcttcaaattttgcgataaggtatgaccaattatttaaaggagtggttgatcagctctactatttctagtgtcgttttatcaataaaaaattcaatcaatcttgtttgttaagaatcggctacaccatataagtttttttttttttttttttttacattcaacatattaagctatatgttttctttaatacattctcttaattggtgaaattaaacagaatgccgagtgaaagagatagccagagaaattaatgacaatttataaaaataaaaatcatgtaaattccacatacatatttatagagttttgtactcacgcacgtgcctttgtttctttttctctagctaccacaaaattccatgactactctggatcacctttagatagtctattatggaccacatttagtaatcgttagattcatttcaggtttatattgatacaatgcattttacacactagatccattctcaccttccttttctccccagcttcaccggaatcctcatctctgtgcatagttcttgcaaactttcctttctcaagagattgagtattaacaaacaacttggaatattgcggtcaagagtggctctgatcactgcataaaaacttacagaaacatgctactataacaaccattatttcctgcgcttattgtaccactttgaaacaatttgagaattggatctcttgaacc

SEQ ID NO: 385 - DNA, 8211 bp, Glycine max; identical to SEQ ID NO: 361

SEQ ID NO: 386 - DNA, 23534 bp, Glycine max
tgattctgattctgatttctttctctttttctctctccctatataaaagacattcgcagtcttttttacattaaaagaataatcatttttgcactgccacgtgagtgccgtgtggcgaaagagtaaacaaaaccgttactccctgccgatggcgatctccgatgtgcctgcagccgctggcacgaccgccactaccaccagcgactcagatctccgacagccttctctgcggcgcaggtcctccgccggagtcctcttcgacgctgccagagattccggctccgacaattccctgaccggcaaaatcaccgacgacgacaacatcaaagatcacaagccgaataatcacgcagcctccgacgacaatgtgggcgccgccgccaatgacgctgggcaggagcaccgacaaccggtcgccgatttcaaatacgcttaccgtccctccgttcccgcgcaccgcagaatcaaggagagcccccttagctccgacaacatcttcagacaggtacatctctctcgctggttcacgattccaatcgtgcatggcacgtcgaattgacgaaaatgtaaaattgtagatgtagctcgtcgaattgcactggcgacctaaacagctttcatgattttgtagtaataataataacagtagttacaaatatgcagtgaactatactctgttttgaaaatataattcaagttataagagaaattgtaacgtgcgtgtgtataaatgatagtattttttatttttattggcaaatgttagtttgttaaaattttagttttgttagtagagttgatcgaactccccacctttcctttcctctctttcattctcccttaagcatccaactcacctttcctctctttcccaacctactctttattggtatgtgaggtgcatgcttagttgttttgtttgtttgtttatcttttggcctcatctatagttctttctattttttatttttactaataattgtcattgttaatcaatgaattacagagtcatgcaggactgttcaatctctgcatagtagtgcttgttgccgtgaacagcagacttatcattgagaatttaatgaaggtttgcccctcttccctctatttttcatgtctatcctgcaaaatttggatttccaacttgtatgcatgcatttatctgtgtgcagctgttttaacttttttgtcatcggtgtgcatttatgttttgcagtatggttggttgatcaagtatggcttttggtttagttcaaaatcattgagagattggcctctcttcatgtgctggtatgtttgatgaatcccctgaagagtatactatgctttgtgtatccattttgaggattaaatcttaaattgtcatttgacattctggaacgatatctatgcttcgttttcagtcttagtcttgccatatttccacttgctgcctttgttgtggaaaggttggcacaacaaaagtgtatttctgaaccagtaagtggtctgaccaagtaagcttttattatattttatgagaaaaaaaatgttgtgaccactgaccacctcagttccttgatttttttacagtgacaattgtttcagaatattacatgagatattgttaatcacataaatttcaatagttacatacatgtgaatgttgaattgaatattgcaggttgttgttctacttcatctaataatatcaactgttgaactgtgctatccggttttagtaatactcaggtcagtgtagtcttcaaaatttattgcagggtttcaatttactttttttttttatttttttacatttgttagtacacaataatatatacaaattttggaagtatttgctaatataattcgaacttaacttgataaaggtgttataaccatggaataatggccattatctaggaaggaattttaataatttttttggcattatttgagaagagatttaatgccctttgatgaacctcatttcaatgtttggtttatactatgctgaagttagattatcttgataattgttatcattataaacacaaaaggttatgccaaggaaaaattgaaaacaatttttgttgcttcttcaaatgtactaatgtgataaatatcattagaaacacaaaaggttatgtcaaggaaaaattgaaaacaactttgttgcttcttcaaatgtactaatatgatcaaagaagaagcctagtctgtcgaaactacataaggagtcatttgctgtcagatgcatttgactgacatccatgtaacatttgcaatcccttaataattatatgatcaaagtaaatccctatgtttccatcaacagaaaaggttaccacatctttggcattctttttagaaattgatttccttgtaagggatacagtaaagatgtctgcttgttggttataataggtaactgttcatttcattgatatcaatagcaaagataacttatgaatctggtacttttctgtgcaggtgtgattctgcttttgtatctggtgtcacgttgatgctattaacttgcattgtgtggttaaaattggtgtcatatgcacatacaaactatgatatgagagcacttactgtttcgaatgaaaaggtagtggttagttttcatgaaaaataatatatttaataagagcttatgctgtacattttatgtgatggttagtttttgagaatgatgaatgaccaaactgtagttgtagtttgtgttctaaaactaaatcatatgcaaaatacagttttgttttatcattattagaataacatctatcccactcccctctccaatccttccttcgtgctccatgctgatattctgctataatctgttcagattagtgaaagataaacattctgtttttccccttattcaataatgattccctgtgttatagggagaaacattacccaatactttgattatggagtatccgtacactgtgaccttcaggagtttggcatacttcatggttgctcctacattatgctatcaggtagtggaactttttaagtgagttgcttacttactttctgtttgcaaaattattttgatttgttgttgtagcatttttggattcaaatctcttactggcctttgtgtacatttatttttctgattgaagcccataaggcattgttttatgaactttttccacctatgtcgttggtgtgaaatgcatttgaggttttaagttagagctccagtcagaatccatcacacacacacacacacacacaattgtacagctaggaatgaaatccccatcctacaagaatactgatctgtaatcattcaatctgtgggatttgtccaaatgactaactctttattttcttcaatagatgttatatctttcggagaatctcttcatttttttatcttaaatttcctttcatctccagatgttgcccctttaacttcattcttttctgatactataatctctctctctctctctctctctctctctctctctcgatagacaggagcaaattttcagtactcctatagtgcctactttgatcgttattactcttattttgacacttttttttaatctcaaaataagttttaaaatagggaaaaaaataatcatacatgccaagtgtaatgcttttaaaggaagcagtaaatattcctagagcacaggaaattttttcttagacagctcaacactttgcaataccaagcactgcataatgaaatttgtagcagaaccaccaaagttccctatcatgcttcactgctaccttccattcatactaaattcccaacaacaaaccttcccattgtaatgagctagtttctatctcattcttttttagttacatcttcctcaatccactaattttggaggggtaaaatgaaacttgctgatctggttgcattttacaatggtggtcgtttctcattttaccctggtgctacggatcttttaggaacctgctataacaccactcagtgacataaaaatataaatggtgtacatttgtggaacttcacgatactggttggctttggcactatgttgcatggatacaggtacagtaccgggtatgagtacagtaccagtaccgggtacaggatacaagatttttcaaaaatctaggatacagattcgttaatatatatttcaaaataatatgtatgtatataaaaaatagaatttaataggtatgactaaatcttcaagtggttaaaaaaacacaaataagcataatttataatataaaagagattaaattgtttaatttgatatcacattttaatagtattatgataccatattttaacaatttcaatcttatcattttatcatcaatagtcacaataaaaaatgtctctatagctggtttgttaagagaaagagtagtaacttgaatttaagaatgtcaacctcttttataactcttactcttttttaagagatgaagatttgtatgcataaagaactagatgttaatgtctctttggataaagcatatttattttcgtagaatggctaaaaaaatatgtgtttcaatttgttttgtaacatacaaacttaggtgtgtgctttgataggtactaaaaagtacccatatgtacccaagtgaaataccccattcgttttttgaaaaataatttttggtacgtacctggtacatactcacgagtacctaacaagtaccgggtacaggtacgggtacatactcagtatgtgtatggcacgattttagaagtactcatgcttcagagctttgtcagcttcagttgtttttggtgttcgctttttagtaagaaatcagctctttgatattaattcatcacttaacccatagggaaagagctggaaaagattttgccagattttgttttagaagtattttctgctgttcacttgtttttgcacttgccaaaatgcatttgtgtgttaactttgttctagtagaaaattctgaaatttttactcacatgtattttacacttaaatgtcctatgtgatgaattactgttatagacaagctatcctcgcacaccttcagttcgaaagggttgggtgtttcgtcaacttgtcaagctgataatatttacaggagttatgggatttataatagaacaagtaagcactatccgttaacaaatttggggttcatctctacccttttcccctttaatttctattcatgaattctgctatattctgatttataacataattctgttcataattgcagtatatgaatcctattgtacaaaactcaactcatcctttgaagggaaaccttctatatgccattgagagaattctgaagctttctgtcccaaatgtatatgtgtggctctgcatgttctactgctttttccacctttggtgtgtatttcctctctctctctctgtgtgtgcttgtctctctctttttgaaaaaatatttgcatgaaattgctgtttcacaccataaattgaagaattgtagctctcagttgttattgtgtttattgccgtgaatgtttattgtcagcagggagatttttcaccataagaatgattaaactgtcattaaagattacatctttatcatttttcagtccctctcaatgccaagatagcattggaaaactgatagtattaccagagggggagagagcaaaaataagtaattaagtaaattcggcaatgaatgtcaaacagtgcttccaagcaatggcaagcaaacataattaatggcttggaagaagtgaaaagagtgtcaaacaaaaagaagtgtggaacctaagcatgaataaccctcaaagtaaaggaaaaaggatagaaagctgaatccatacagactaaaatagggtcaattgaacaaataacgaccattatattgcatgtagtgtgggaacagcaatcaaacagtagcaaacacatcaaatagagacaaaccataatgatgatgtggttgcctgaaaactgaagaaaaatgccaaacattctttcacacattgatgatggtcactgagaaagaaacatggcagaacatcagtgcttagaaggttaaaatagattgtttattgccataatttaatcagtgcacagtaggagaaaacattgtcatcagttctttttatggaaatcagcaccaaaataatgacagaaaatggagaatggttctgaccccaattataaggtttaggtagagaaagaggaaaaggaatactaaacatatttggataaatactcaatttagtccttgaatttgcaaagcgctgacactaggatccctgaattttgaaaaaaataaaattttgtcccttaatttgtaaaaagtgtgacaaatccgtcctaccatttattttttccgttaatgtaaacggcaaagtctacggggtatcattggaccgttttgacaatgagaaatttgttaagtatgttgctgactcgaatggactaaattgtcatctacaatttcgatagaccaatatgtcagcttggacaaatttccatttattttctctttctttctcagatccctttttgtttttcctctcctctccctcttcctcacttccctctccttctgtgcttctatgtcaaggaccacaatgtcgccgccgctatagtggtgctgcagacatggtgcgatggttcaaggagcgacatcgaccttatgaaggaggtagtgtacacatggtggaaggggaaaatagaaagacagaagaggaagttaaacaaaaagcgccgttgccggaaatcactttcgttggcggccaacgacgacacttatgttgctttgaataacagccatgtcgaagcagcattgggcaagagcatggcagttcccagtggctcgaatcggttaagggacttatgggattaagtatgagtgcccttgttactcccttttccttttgttttgtgttatggtggtttctctttggttagtttaggtgtggcatttgggttgttagaaaccactgaaatgaaaatgtaatactagattcagggtgtatctgttcatggtggactaatttggcatttagttgttaaattcagggatttaaatgacattaagtaatattattcaggggctgatttgtcagtttttttttataaaaatgagacactgaaaatggttcttgatgataaggaatccaattgtcaaagggtttgtctctcactcactcagagaaggcaggaacaccaaaaggcacacatggtgggcattggtgagaatgggtaacaaatgttgacccctttcaatattatacaagttgtaaaaagtgaaacaaaattttctgacaaattagtccttcaaattttcatatggcaatttagtccatccgagtcagcaacacacacaacaaaattttcattgtcaaatacatccaacaatgccacgtagacttggccgtttcgtttaacaaagatttgacggcaaggtggatttatcgcacttttttcaaattgagggacaaaattttattttttcataattcaaggacccaagtgtcagtgccttaaaaattcaaggactaaattgggtatttactcaaatatatttggattatattgatgtggtaaaaatgatgtgttacaggatactaatccattggttctctttatacaaatgattaggtcaaatactagtgcaatactactagtacaagcccaagcctgataataccatacgtgatacgactactaaccctgataaattaaggtgtaaaaaataaggaaacataataaaattaggaaacaatgtctactattgtttcctctattaagcattaagtaactaattgattccataatatactctaaagataaaaagatattctgaaatcttctaagatacacaaaagatattcgaagacattttgtacatatttgaactgatagaatatcataaaagagaaagagagagagtaaagtctatttctcatatattgatcttatctgaaataatgaatacaatgctcttatatagagtagcaacaaactattgcataacaacgtaacaaactaatagaatccagctggcataactcacttactaactatttaccctattcactctattattcccccttagaaactgagggtgcatcaagcagattgagtttgttgatcacacgcagtttgtcatgcagagggagaaatttcactgctgagagaggcttagttagtaagtctgcccattgatcttgggctggaacatgcttcacaatgagattcttggagagcactttttccctcacaaagaatatatccaattccatgtgcttggtcctattatgcagcacagggttatgagcaagggtaacggtactgaggttgtcacagagaattgtgggagtgagaagtctgcatttaagttcttgaaggagagactgcacccatagaatttctgcagcaagttgagccatacttctgtactcagcctcagcacttgacctggcaaccaaccgttgtttcttagaccaccaagatatcaagtttggaccaagaaacacacatgctcctgaggtggaccttttgtcatcagggtctgatgcccagtcagcatcacagaacccaagcaaagacaaaggctggtgaggtgaggcaggctgaattagcaagccatgatgcagagtgccactaaggtacctcaatatccttttaactgccttccaatgctcttccaagggattagataaaaattggcaaaccttattgacagaaaatgagatttcaggtctggtgagagtggcatattgaagagcccccacaacagatctgaactgagtgggatctgaaacagccggcgaaccaattttagacaatttgcttgtggacaccataggagtaggcatgccattagcattgagcatgttaattttagcaagtaaatctgtcagatatttggcttgagagagaaggagggagccattaggcaagtgtgttacctctatgccaagaaaataatccaacttacccaactgtttgagggaaaaatcagtattcggattcttgattaaagcagtaataaaggatgcagaattgccagttatgatgatatcatcaacatatacgagcaccattatagttaagcttgcagtgtgaaggagaaatagactagggtcacatttgctagcaagaaaaccatgatgcagaagggatcctttaagtttatcaaaccaggctctaggggcctgctttagtccataaattgctttgttcaacttacatacaagtgtcttgtcagcagcttcaaacccaggaggctgcagcataaaaacttcctcctcaagggtgccatttaagaaggcattgttcacatcaatctgctgtataggccacttgtgagtaacagcaagagtaaggacagttctgacagtaacaggcttcaccacaggagaaaatgtctctgtaaaatcagtgccagcttgctgatggaagcctttagctaccagcctggccttatatttgttaatggagccattggggttctccttcaccctaaaaacccacttgcagccaattggcttcctagaaacaaatggcgacaccaaggtccaagtctgattctttaacaatgcatgatactcatctttcatggcctgaaaccaatggggagaagacaaggcctgaccaactgaagtaggttccatatgagtgagtaaaagagtgggatgaattttaggcttggtaatgccactcttggctcgagtttgcatgggatgagtgttatgaggatggatagagggttgttggggggttggtacagggctgagaggagaactggtggctggaatagaggatggagaaatggtgctggcctctgcaatatcagatgtgataggggtgagagaagagggagtgatgggagagtgtaaagaagaattttcagaagcaggggaagcatcattggaaggtgttataataggagaattggcagtgttaataggagcagacatagggctgctaagagaaacagaggtaatgggtgtagcaggaacagaactgacttgtaagaggaatagcagatacaggaactgctggtatagaccaggcagaagaagtatgaggagatgatgtggatgtagcagaagaagaggggaataagatggagtagggaaatctggtttcattaaaaagaacatccctagagatgtaaatacggccagtagctgcaaggcatttataacccttatgaatggtagaataaccaaggaatatgcactcttgggatctatagtccaatttatgagcattatagggacgaaggaagggaaaacaagcacaaccaaggactctaagatgagaatagtcaggtattttgtgaagtagcttgaaataaggggactggttggcaagagacatactaggcatcctattaattaggtaagcagctgtgacaaaagcatgatcccacattttgagaggtaagttagagtgagctaataaagctaggcctgtttcaacaatatgacgatgctttcgttcaactatgccattttggtggtgggtgtggggacatgtaaacctatgagtaatgccaaggttattgagatacctggtgaaaggcctaaattcacctcctccatcactttgaacaactttaattttacagttgaattgaagttcaaccattgttttgaattggacaaattgagtaagtgtgtcagatttaagtctcaaagggaagacccaaacaaatctggaacaggcatctatacaagtcaagaagtaggtataacctcctaaagattggataggagctggtccccataagtcacaaactactaactcaaaaggttgagcatacacaatagtggataaagaggtaggcagtctgtgagatttgcctaaacagcaggcagtacaaaattcagctagagacttggggggtataggaatattgcaagtttttagcacttctgcaagagcttggtaatgaggatggcctaaccttgtatgccacaaagcatatttgctggtaggtataatattaggaacaatagaatgttgtggagattgagaattattaaatgtagtagcatgaacaagaggtgaattaacacaggaaacattgcttgtattcattgaaacagaaggagtacaatcagtaatacaatcactttgagcattagaatgaagtaaagtattacatgatgtactaggattacaattgtttgaacctaaggctacactagaattgaggctagagagagacttgaacttggacacttgagacgagggactctgaaacttgtaaagaccatcagcttctacaactccacgaagaagcacctcagaagaatcctgagatttaacaagacaaaaggaaggatgaaattcaaagaaaacctgattgtcttaggcaaatttactaacactaatgaggttcttggtgatgtgaggtacaaggagtaaactgtgtagagtgagtggtttgtgaggaaagttaggggaagtaaaattcatggaacctatagagttgatagacaaaccttggccattccccatgaacacttgctcagaaccagtcacagagtgagcatcagacacattagaagaatcaggtgtaacatgatgcgatgcacctgaatctggataccaccattggttgctgaaggttggatcagaactgcccataaacgcttgtggtggagaaggtctgggtgcagctggtctaggtgaagcatagccaaaagaaggtgcatacaccggtcgagcattcatcagaaatggattgaagggagcacgttaaggtgaaaacggtatagaagcggattgcgaatacctgtaataacagatagaggcgttatgaccacttttgtgacaaatctgacattgagacttaccaaaacggccacctccacggccaaaacggccacctccacggccagaacgaccgcctctgaagttataattattgttttcagcatgagcagtaacatgactagtgccagtgggaaacaactctgtagcaggagacgacagttccatcggagaagacgaatcagacggctgagcctgcgttaaattgactgacactggttctgtgagaattgctttccgatgcttctccaatctcgattcgtgtgcaaggagacaggattcaagttcatccaaagagctaagatcttccttactattgacagcagcaacgataggatcatatttctcgggaagtgcatcaaggacgatctcaattaggttacgaagaggaacgggatctccaattgagatcaaggattcattgatttcgcgaacacgctccatgaacgactcaatcgtgagagtacctttggagagacgacgcaattctgagcgaagctgacgtgctttcgtcgtgaggagcgtggcgaagtaacgatgcacttcagtccaaacctgccacgcgtgcgtgcagtcaacaagcttcgggagcagcgaatcagagatcgtggagagaagccacgtacagatgagagcatcttgttgttcccaatccagatatgcatcgttcacctcactgagattaggatcggaagtagaaggggaacgatgaggaatcaccggaaccgtgacgaagcgttgaagcttgtggccacgaacaacaccgtcaattttttgtttccactgcttgaaatttttatcatcaagcttgatggagataagatgtgagagtttgacatgagaagaaggaaacgcgccgtcgttgcgaaacggagacgccatagatcaagatcactggatcggaaaaagagtagctctagataccatgatagaatatcataaaagagaatgagagagagtaaagtctatttctcatatattgatcttatctgaaataatgaatacaatgctcttatatagagcagcaacaaactattgcataacagcatagcaaactaatagaatccagctggcataactcacttactaactatttaccttattcactctattatgaacattaagaaattgtagggctttactatatcaaatagtatgcatacttttgctgtgagatatcttctcattctgtgtgctcttaatttcttttccttctcatcattattagagtatgtacttgtacaactgtgaaaacagttttgtaaaatgattgtaagggctgttagcttttgctaacagcacccctttagtgttaaacaatagattatatgtttgtaagggctgttagcttcgactaactgcacctcactaggattagggagtcagagtctattagtgttagtttagagggtaagaggtaagaggtctatatatacctctgctgtaactaattctaactaatttttcagatcacaataatagcagttacacttttctctcatttctcttctcagcttatcaaatatggtatctagagtcaattttttgtaatcatcgtcccttcgcaagttccagatcagtgctttcatggcttccactccttcgaacctcgtttctcagtcgttcccaaactccattgccgaaaaacttgatgactcaaactatcttcactggcgtcaacatgtagaactagttatcaaatctcacaagttgcagtgtttcgttgtcaatcccgccactccacctcgctatctcacagaggatgatcgaattgctgatcgcgtgaaccttgattatgaagcttgggaggttcaagatcaagcgctccttgtttggtttcaatctacacttcatgagtactttagcctccatacgaagtctcgtgcttgacagcttcgcactgcaatgcgcacaattacacttgactgcaaatcaattgatgagtactaacacaaaatcaaaggatatgttgataaacatgctggcgttggagttcctgttcgtcacaaggagtatgttgatgcgcttctcgaaggactactgtcagattacgtgccagtaatctctgtaatcgagagtaagaagcgcactccatccattgcaaagatagaagctttactctattggtcattaaacttgtcttacgctctacaacaaagatgcacaggtgataagctctacgtccttgaactacactcaaggctattcgcaacaaaactcgtataaaactggtgattctcgaagttcatatggccgtggcggtggtttcgctgactgtggtgccagacatggtcgtggtggtggtcgatttgctaacttctagtgtcaaatttgtcttaaatatggacacactaccaatgtttgccattttaagtctgatataaattttcagccccatgagtccatgagtctctcacttctctgatcctaccacattcccacccattccttactccactagttcagtcagagcctccaatacctgggttaatcccaattccaaagttgttgttccaggccccaactaacccagtgctatgctcacaaattcctcctctcatgggaatggtcctactggctctacttggattccagactttggagccagttttcatgtgactggtgacttacagaacattaaacaattcactcattttgatagacccgatcagattttcataggcaatggtgaaggtttaagtatctctaatattggttcctcatcctttgtgtcccctgatgatgctggcataacatttaaacttcacaaattattacatgttccttcaatttcgataaatttgtcaagtgtgagtcaatttgtcaaagatagctctgttttctttgaatttcatcctcacttatgtcttgtgaaatctcaggagaccaataaggtcctccttcaagaagttgttggtgctaatggactttactcctttcataatctcaagcttcaagcaaaatctcgtctgctgttgtctacctcaacctctgtttcaaatactagcttccctagttcaactgctattgttaataataattctagtgtagtttccaattctgttgtttcttcttctagtattactaatctctgacatgctaggttaggccaccctaatggtcatgtaatgaaaattgtcttcactcattgtaacatttctcaattaaataaaaatttcacaggtttctgttcttcctgctgtatgggcaaatcttatagattaccatctcacaattttgtttctgtttaatcccctttagaggttattttcacaaatttgtgggtcatgtaatgaaaattgttttcactcattgtaacatttctccatcgattaaaaatttcacaggtttctattcttcctgctgtataggcaaatctcagattacttggttctcacaattctgtttctatttactcccctttagaggttattttcacagatttgtggggaccttttcatgtcacttcatatgctggttataaatatcatgtctcctttattgatgccttctctaggtacacctggatatttcctataaagtccaagcctgaaagtatttctatttttcaagcttttaagtctatggttgaactgcagcttaataacaaaatcaagagcattcaatctgattggggggaggggtgaatacagacttttttctactcttctagtctcctatggtttctctcatagactaatcttccctcacactcatcaccaaaatggtgtggttgaaagaaaacacagacatatagttgactcgggcctcacattgttgcatcatgcctctttatccttgcagttttgggattatgcctttactacaactgtcaatttgattaacaggcttctcactgcttccctcaactttgttgtcccttttgttaccttgtttaataaggatcttgattattattttcttaaaacctttggctttgtctgttttcctttactgagatcataccatacacacaaactgaattttcaatctcaggaatgcttatttttggggtattcctcttcccacaaaggttacaaatgtttgtcctcatctggcagaatttacatttccaaagatgttttgtttaatgaattaaggtttccctcttcctctaaacccattaaaaatcttgattcctattttagtctcaatcccaacctttctccaccttctgctacttctacccctcaatcctctcaaatgtcaccctctaattcagcctctattcctcttgttccccctagtttttctcctataccagctcattcccccatcacctctatgtttgtgcctcatccatccacttcctctgaacctacctctattcagccttaagtttcagagtctactaccccttgtgcatccacttcagagtctgtttcagcacctagttctatacccagtgaatacacaccctatgcaaacaaggtctaaatctggaattcacaatcctagactacatccttctttatttcttacccattttgaacctaaaattgtgaaacaagctccagaaaatacagattggctttgcagcaagagtatgatgccttgttgaagaataaaacttgggacttagttcccttacctcctaatagacaggccattggttgtaaatgggttttcagggtaaaggaaaatgctgatggttccattagcaggttcaaagcaagattggtagccaagggatttcatcaaattcatggttttgattttcatgagacattttctcttgtgatcaagccaatcactattcgaattgttctcactcttgctctgtcccgtgggtggcaattgtttcagcttgatgtgaataatgctttcctaaatgggtctcttgaagagtctgtttttatgatacaacctcttggttttgaagttgcagataggtctttagtctgcaagctcaacaaagctctctatggcttgaaacaggccccaaggcaatgatttgacaggctgaaatctacactgttgcagtttggttttgttgggagcaagagtaattcattcctatttatctatcggcaacaaatgcatatagttttccttctagtctatgtggatgatataatcctcacaagtagcttagcctctctaattcagcagctcacaaacaaactacacactgcattctctctcaagcaacttggtcatttggattatttcatggatctagagatcaagtacctatccaataattctatcctgatgactcaaagcaaatacattcgtgacttcacaaaactcacatggctgaggctcattctatttcttctcccatggtctccaactgcaagttatcttgacatggtgctgatgtttttcatgatccaactctatacagatctgtgattggtgcattacaatatgctacccttactagacccaaaatcagctttgctgtcaataaagtttgtcaatttatggctgcccctctagactctcattgggcagtggtgaaaagaatcttaagatatctcaagggcactttgtttcatggcctacttctattacaaagcccttggttattcatgcattctgtgatactgactgggcatcagatgtggatgataggcgctccaactcaggggctgctaaatttcttggtccaaacttaatatcttggtggtctcacaaacaaaaagttactgctaggtccagtactgaaactgaatatcgcagcatagctcaaacttcctctgagttaacttggattcatgctctactaacagaattaaaagctccattctctactcctgtgatcttttgtgataatcagagtgttgtctctattgctcacaatcctgcatttcacagtcgtacaacgcacatggaaattgatgtcttcttcataagaggaaagattcaggccaagcagctctctattgtccatattccagctttggatcaatgggctgatgtattgaccaagcctctttctgcatcaagatttgaagttctcagagacaaactcaatgtgaagagtgtttcttctgaaaacttgagtttgagagggggggggggggtattagagtagttgtacaactgtgaaaacaattttgtaaaatgattgtaagggctgttagcttttgctaacagcacccctctagtgttagacagcagattatatgttcgtaagctgttagcttcgactaactgcacctcactaggattagggagtctgagtctgttagtgttagtttagagggtaagaggtctatatatacctttgttgtaactaactctaactaacttttcagatcacaataatagcagttacacttttctctagttttctctcatttctcttctcagtttatcgaataatcattaagattcttattttatgaaaatagtataaattccgtgttctcttgctcaagtgctaacctttcaagctatgatcaatgtgtcttatttatagttattaaaagtagtattttaaaaattattcatttattgactttttttattaaaaaaaaagtaatatctgtagtggtttatccttagaggcactgttgcaatgtaggttaaatatacttgcagagcttgttcgatttggtgatcgtgagttctataaagattggtggaatgccaaaactgttgaagaggtaggctctgtcctggcatgttcttggattgtttatttaaaagcactttcttgaagagaacttatgacttgtgtttgctgaatgtatttctgctgctgatgctgccatcagtattggaggatgtggaatatggtatgtttccttttcagatttgcctgtgtgaaatgatatacttgcccagttttcagatgaaattcttgtcaaagtatatatatatgtgtgagattttgatataaatatgcccattaggtatagccatggtattgtaaggctattttaacaaaaaaaaaagaaattaggaagaaagataactttcagtattttccaagtattctgtcttaaatattccgccatttacttcatatatggttctgaaaccatatgccagaacatatcagcaattgtttataactttcatttgtagttctaaaccattaatattcaactgaaaggatttttttataatgcagcctgtgcacaaatggatggttcgccacatatattttccatgcttaaggcgtggtatacccaaggtaaaaagaagcatcctaccatattgcaagtggaccctaaaatgtaatttttaggcaaaatttaggcgcaaatgaagagcatgtcttcaaaactttctgtttttagaatatagttagtctatcatgataaataagtatgtgtaaaaaacaatttataaatatgctatttaattaatgtgaaaacagaaattaggtgcaaatgaagagtatgtcttatgttgaattgtaactgttgtttttctcaatccatcagtattgtagcttctcagttttgtgctttggaaagcatgaatggatgttaagaacctgtgaaacggcaatccaaacacacacttagttgtttgtgaaacattttcaactgatatactatattcaaactcagcattttttgttttgtcacttcagatattgaatttggcatacctagttacatgaatgatgaatttgcatgtgggttgacaagattaaacaagaatagtagaggagctcactttatttttctcatgttctataatcttgttctttgttattttgggtctttgctttcagcttgcttttcttagttccttttgtatttgtgattgtgattttcattgtatacagggtgctgcttcattaattgcattcctggtttctgctgtgtttcatgaggtgtgtcgttcatctctctttctacttccccaacgagtaatgatatttagacactcacatattgcaaacacctatttgacacctttgttttctctcaatctctttcttcatatcatctatcatacttatacttttctatcttctctcttgaggtatcaaatagcacatgggtttctatttatccttatccttcccgaattgtcctctcctttttggtagtttgctataatgtgattgagtaaacaataaaattgaatttagattatcttaattttgaaaaactagttttaataaaaaattggtttgaagcaaaataatttatggctagatatctcatatctctgttgaaaagtaatggcatactaaaaaagggtaattaactctgttcaccacataagcatcaatgttttacttctactcaaacttccatttgaactaattatgtaaatttcatggaaaataattgcctaattatcacaattacgtaaattctaaaattgtctaattaccataatttaagttatctaacaatatccaacaactgcttaattgccataactaaagaaccactttgagacactaaggcagaagaatcaataggtctagatagaacatccacaacaaagggggtccggccattcgggtggcacacacaataaagtagaccacatagaattcaaagaaggaacgataggaggacccaaaatttggttagaagaatactccgcaagtaacccatataaggtcaagggcatgaaaatggtcttctggtgttcatgctcctaggctagggtggctgtaggggacaaatgctctttgaagtcatatgaataagactgtgaactttgcctaaatattcagtcataggaccatcaaggtggtgaggggcaatgatattcatgaggaattgacgaaccccattaaggcgttgagtatcattggtgtaaagaacctgtggtctgttcccaaacttcttgacaagtctcttgagcacaaaatatatgcttcagagtggggttgaacggtggttttcaggacaccacacagctgggcatcaatcttgttccagaaagaacggtcaacacatgggatagaatcaaccttcgtggcgaggtgatcaacatagtcttgacccttatgccaaaccttgatcccatccaacttgtcaatagagagtggaacagagacatggtgaaaataggaggctcaaccttgagaggggcagaagatgccatgggttaatccagactccagaagagagatgtacagcctgtaacagcaagaaaaaaaggaaaataaaaaaccacaagttggggtagagcacagcgcgagcatgattgcgtttacggcaacaggaaaaggcacagaaggcagcaacactacccggacaccagatagacatggtttctggaaaagaaaataggcaccaatgaacagtgactcccccaggaaggcacgaaataaggtctcgttaggctctagagagaaagcaggagacatgactgaatccatgtcaatgtacacagctgagtgtattagtttggataataataattacagagaaaacgattgctaattaccataattatgtgaatcctaggatttcctaatgaatataattaaagatatctagctttttttatttggtacccataacatttttgtggagtttccattagatttgcttatgattaatctcgaaaactggtcatctttaatagaattttctctctcaattatgttttttccattcataccaacaacttgttgataaagatatctaattatagccaacaattgcctaattaccatagttaaatatatctaaataaatactatcatgttggaataattgattttttaaatctctgtggaaaaaacttaaacatcaattaatttggactagagggagtaaaatatatagtggagcaacccctgtaaagtgcttaaatagagatgcccttatatggtgttcagatactcggcagactattatgtttctagtttctaccagtgtattcatacttattattgccattgtttttttagttgagttgagtcatttgttgtacagcttttcattttttcttcatttagcaattttgctcataatttctcatttaactgcagttatgcattgccgttccttgccacatgttcaagttgtgggcttttataggaattatgtttcaggtaaaggcttattgctatattctctttttgtccattgaaattatctatttttaagcttcaattatcaatttatcattcaagtataaaatttgcacaaattttcgtagaacaataaacatcactttatataagaaacgaaaagctggagtgagagtttaattcatgttatatggccaagtgaaagatgttgttctctagacaaatttgtgttatcttaagcacagttgataacttaattatgatatctgtatttttagttcacttgacatgataatgacaaatgtcttttccctcctccatctaggttcctttggtcttgatcactaattacctccaaaataaatacagaaactcaatggtatgcctctaaagtgtcatatttaagaactttggtctattaatgaggtatcttataaaccttcaagttgatttattcgtttttaattgttattttatgcatgccaggttggaaatatgattttttggttcatattttgtattcttggtcaaccaatgagcgtactattgtactaccatgacttgatgaatagaaaaggagaagttgactaaggtagcattacactgttcatgtggatgagcttttgcgttttctgagtaaaatcgatgttgatatgttggcttctttgttttgtatggggatcaccacctgttttgatagtgagtcctctgggttgcatttccatgttaattgcctagtctttcgagcttaattcatcttgatgtatttctttgacttagttgctttggcgcttttatcatgaaagcaattttggaagcaaactaacgaaatgtcaaacactaactgctaaggtaacactaactactaagttgagtgatatatagctgtaaatgccaaagttggtttaactgtatctggtttctggaagttcaacctatgaatcagttggggatctaggattctaagttaggagggataatttatttaaaaaataaaatttaataatttttatcatgaaaggaggaaaaaattaggtgtagagggttcaaatatacaaaattaggagggacaaaatacaggtatttaagatatttttatgtaactttttaaaagtgagggaatgcatgtgtaccccctaaaataagtgtcaatctgccatgaatggtgatggttatcattcaatatgaaacatgttattgcactaatagcatgttaatttcataaaatgaggaattgttgcgtaatagttgtggtaaaatcgttgcgaactgccgagctacatttgttttacctgattcttgaatcattaaaggcggttccgtgagatctctcattccctcttggcaaacaaggtttgggattcattgctttattgatggctttgcggctggcatttaatagaaactagattttgcaactgtgcacctgtaagtatttttctgttgtgatatcaattttaacttttaaaattccactatattaagtcaatttttgagattaaagaaaaatatttttgcattttttcctatctcaaatcggtatcatgaaaattaaaagatgagtaagattaatgtcaagtgaatatttattaaagaataaaattaaaagtctaatcttaaagtcatgatttttttacatattatacttgtattataataataatcataaaataaggataaaaatattaaatgcgaagaattcaaattacatttacatatcttcattttctatataaagaaaaagccaccttgccttatgcgacatt

SEQ ID NO: 387 - DNA, 23534 bp, Glycine max; identical to SEQ ID NO: 386

SEQ ID NO: 388 - DNA, 10265 bp, Glycine max
ggaaagaaaaaagagaaaaaaatgtaagtataataaaatttaatatttgatagaaagataaataaaaaaaaattaagtggtaaaaaaaatattttgaataataagatatttgggtaatctaaaatctcatgcatttatcataattctcagttagacggatcataatgaattattttgttgcttaatatgttgacacttctttgattatttctttcaataaaaatccaaacactgtttgggcatattatgaaagattagtcctttataaacccgtcttagatttccaatcctcaccaccgctttgcttaatttattcgaatcagattcctttttatctttgcgtatcaacacgacaaaacaaacaacacccactatcttcttcttttttcctctttccctcttcctccctactctcaataaattaataaatatatattattattagttaggcttcctttatcatagacgatttctttgcatctaaaattttaatttttccaattactttataaaaaaaaagtaaatacacttaattcaatgtcttacaaatataaaatgcattgagcacttattgcatacaagaagttaggagatttggaattattttattatataatgtgagtaataattatataaaaaacaattaccttattactataatgaaaggtatctaacaatttccaaattatcataaataaatatttattttatataactaaatttcttaataataaatatattttaatatataaactaaattataattattttttagacaaaaaataattagaatttataataaataaatatctttatatatataatttatattttaaatttatgaaaataatttatattgttatataagattaatttatattgttatatatatactagccagtattttagtagcatgtacacaggtaaattctattttttttttaggtaaagggtaaattctaatttatatgtagaaatataaatagattattattattaaagaacaatagaaatctgttgtttattttttggtgaagagaagactgagttagtaaacacgctcgctcggtcttcttttccaatggcgatttccgatgagcctgaaactgtagccactgctctcaaccactcttccctgcgccgccgtcccaccgccgctggcctcttcaattcgcccgagacgaccaccgacagttccggtgatgacttggccaaggattccggttccgacgactccatcagcagcgacgccgccaattcgcaaccgcaacaaaaacaagacactgatttctccgtcctcaaattcgcctaccgtccttccgtccccgctcatcgcaaagtgaaggaaagtccgctcagctccgacaccattttccgtcaggttctcgccgttaacttctactttacaattattacaattccgtaactatttcaaactcaaccagaacggtaccgtttcgttcccgttctgcattaataaactactcaatctcaatgcatgactcatgaatgcaagcgactcgtagtcttttaggtgcttaaaatagtgtatgctactgctagttagttaatttgtgtgtacgggaaactagttatcaatttatgatttgaatttaatacaattgaattggtggatcaggtttttgtacctgctattgtgtttggtttataattaggtgtgatgagtctgatatgtaattatatttctttactaattattcaatcagttgcagagtcacgcgggcctcttcaacctctgtatagtagtccttgttgctgtgaatagccgactcatcattgagaatttaatgaaggttttgcctcttccatgtttaattgtgcattcacctgcaacaattttctgttctttttatttatgaccttgattttgacggttcgggttttgttgtctgctttaatgagtgttttatttgttctgcagtatggttggttgatcaaatctggcttttggtttagctcaaagtcattgagagactggcccctcttcatgtgttggtaatgagtgtaatgaattccctaaagaattaactatgtactatgtaattattctgaaatgttgttcaacagtatgtggttgtgcacttggtttgcagtctttctcttgtggtatttccttttgctgcatttatagtggagaagttggcacagcagaagtgtatacccgaaccagttaagtgatcaggccatatgagcttttattagatttcattcgttttataacctaaaatatttttgggatatggttagttgtgatgtgctattcttaactgttcaatctttaatatttgcatacatgagaatattatattactttaatattgcaggttgttgttgtacttcatataatcattacctcagcttcacttttctatccagttttagtaattctcaggtcagttaagttcttttgtatatattctggggctgcagttgaggcaccttttgttttgacatgggtggttacacaatgtgtccattttgaaagaatttggtaatagaatatggttttaagttgatagtggtgttaagtaacaaactttgtcactatcctgcacaggaatttaaatttttttattatattttaaaattacttgagaagaaatttaaagcatttgggtgaaccttagtttaatgtttggttcttatcatgttggaattgaattatgttgcaaaatatgaagatgaatgctgagggatgaaataattatacagttgtgcattcttagtcatttcatagataaggatatcccagaaagatgattactgacttgtaacattctttgcaggtgtgattctgcttttctatcaggtgttacgttaatgctatttgcttgtgttgtatggttaaaattggtgtcttatgcacatacaaactatgatatgagagcacttaccaaatcagttgaaaaggtaataaatactctctgtttaaacggagagaaaattttgaatttttttttcttaaaagtcaacttttctctcttgtctttaactaaacaaaagaaaatctatctttacgtgttttttctttcatctaattttttccttaaccaaacatattcttaaattctacttggcacttgtaagtgggtagataactatcacaaaatatcatcgtcacttatttgtatactttaaagatgaccatatgttgtacaatgtttgtgatgattagtttttgaacctgaacatcctgcttgacttagcagtagcttatggatcatgtactcttaaaacttcattatatgctgaagtacagttttatttcatcttcatttgaattacttccatcctgtgttccgctttattgcttccttctatctagatggttagctcttcaaacgtgtgaatgtgtgatagataaaccatctgctttccctccttattcaaacatgtttcatgtgttatagggagaagctctgcccgatactctgaacatggactatccttacaatgtaagcttcaagagcttagcatatttcctggttgcccctacattatgttaccaggtagcagtactttcaagtgatttagttaatttttggaagcaattttttttaattgttgtggtgttgcctcatttagattcgcctattttacatttgcattcacttttctagtcttagattgcttataggcacaaccatgtggagttgcttactcatatatctttggtgtggaatatgtctgaggtttttagtcagtgtctaattggacatgctgttgggaacccagaaacagagtatgagaaaagaatgcttcttgtactaattacagaatattgaatgacaacaaagaaaaggggaaaattttgctcaaagagtttctcctttcacaacacagatgcttaattgaatgactcccccccccaaaaaaaaaaaaaaatcttcctatatgtttctcactaaccccctctaactaagaatcaaactaattgctctaaccatcccaactaatttcactgctaggaattaagttcccatctaacaagtataattgatccagaatgttgggttggctacatagtaggatttctctgaatgactctttaatcattgtcttcaatacattctatacctttcagcaaatttctccatttattatcctttctttcctttccatcttctaattttggccatttgacctcgttcatctcacattcaatactcctttctattttgtagcatagaatattgtgtaatgaaatctatagcaggaatcccccaaacccttctcatgccccccctttacttccttcgtacaaaattcccattgcaatctgctagtttctagacacaacctgctagtcaatgcacggtgtaggagccacaatctgttagtctatgtgttcctcaatctgcatataatacttcttgcttcttgcttttatatgaagctaagaataagattttaagggaatgagtattacatgactccccggcataaaatgtagcatgcatttctaatgctttgtgagaatactggattggctttggcatcttcagtgtttacctacgttgcagaaattttgcttggggttctttaagtaggtttctgcagttcatttgtctttgcattttcctgcataaatgtatctccatgtgaattgcatttgttattttttttattctgagagcaaggtctttcacatttttatttgcatgtattttgttttatgaactgctcttttagccaagctatcctcgcacaccttatattcgaaagggttggctgtttcgccaacttgtcaagctgataatatttacaggagttatgggatttataatagaacaagtaagcagttcctgttaataaattgtgttcatttctacctttttttcatttctttttttatgtacatttttttcttgaggtctatttcaccaattctactggtattctgacattattttgactgtaattttgcagtacattaatcccattgtacaaaattcacagcatcctctcaagggaaaccttctttacgccatcgagagagttctgaagctttctgttccaaatttatatgtgtggctctgcatgttctattgctttttccacctttggtattccatctcttgtttggttcaacatgtgtgtatgtgtgtgcattttccttacaagatattagtatgaagttatcttcacctgccataaattgaataattatagttctagtttattttgtttgatgccttgacttttgtaccctggcaattttctgatgatgatgatgttataagttagtaattgattaatctttcaaatcatccttgaagtgatatccaccttcctaaacaccttaaaatagtaattacatcatcaatgggaagatctagctgatctaaaggtgtgcatgtagagactattggtgtcttgagtgtacacttctaaagatataaaataaactttatagcctgtttggtgtgccaccaatgattaatttaagtgacactctgacggatatgtgaaaggatttgagagccttattttattgatggatttgaatatttttcctttggccagtgaggatatattattcttcatttatgctcttttttctcctctttaagaactactcttagaaaaaaaactagatctttttttgcaagcataaatgctgatctgcttgtctcatttgtagatattagaaaaggttcacctttgattttttaagatttagttaatatttgaggaagcttatcattggagtgactgtcgtaatgtaggttaaatatattggcagagcttcttcgatttggtgatcgtgaattctaccaggattggtggaatgccaaaactgttgaagatgtaagttatttgtcctgatattttgtcgtttacttacagtattttcagtcttcataaagagaaattgtgactttttgtttttgtttctgtatttgtgctgttgttgctgcttccatcagtattggaggatgtggaatatggtatgtctctttttcagacttaattttgatgaacaaattgattttcttgtgttcagcaaaatgattttcaggtctcctgttgggatgaaattcatgtgaacacacgtacatatatttgatataactatccctttaaatgtataatgagggttgacaactctccaagactattttaacaacggaagaaagagaagttacaacttttttccatcttactgactaaatggttttaaaactgtctttcagaacatatcattaattatttatcacgtaaagttccaaaccattagtataatctgagcggaatcttttacattgcagcctgttcacaaatggatgatccgccacctatattttccatgtttaaggcacggtataccaaaggtaatcaagcatccttctgcgttgctgaatggatcctgaacttatttggtactgtaaaacatttttaggatttgtcagcctctgtttaccatctcgggttgctactaagatcatcacatttaacatagttgaattaaaatgaacatgttacttttatcctaataatcacacttatgtaaaaacttatcaataaacctattacataagttttttttcaaaaaataagtatttgcactaattgtatggtttgatatgtttggtgcactgggggagctatatgtagaaagtttgcaattggtagacagtaatttagcttcatcttctgttctgtcatttcagataaattactttggagtgcataaacatgactaaaacaagaattgcaaaggaactccattaaaaaaaaaaaaaatcttatgtaatcatgttcaatagctttgtgatttttttccttggtctttgccatcaacaatttcctattaacatatagttgtttctcattggttaatatttggattggctctttttttgtcaagcattattggtatttcaatttttagttctagataaaatttttatttttcatcattgtacaggccgttgctcttttaattgccttcctggtttctgctttattccatgaggtgtgttgctcatctctctgtacagccttctctcttctttttttggtattatgtcattatggttgttctgcttgagtgtttgtctgcatcctacactgattgaagtcaaactgtatcttgcaattaatatatttttggagtatcctttcctccttttccttgggctgtttggactttgctaagagttagatagaagggaagggaaaattagttacagatggttagagtagttgattagtcagttataggatttggttagatattaattacggggattaagaggaaaggatccattctatctagttgattagtcagttataggatccattctatctagtatcatttgagaattgagcttggctcttttgaaaggagaaatcctttgtgagggggaaacccttggaggagaattatctcttcttttttctgttctagatgataaaactgcccttttatttctttctttgctttgggttcgtaacagactgtgggagaggactgaaaattagatactaagttgtggctgatttgttaaaaattggtataggacccatgctacttgtctttgaactatctacaacccactatggccccagaaaccttaggcagctagctaccaaaatctgtagtaacttgcagcctgtctgtctgtaccttggcaggtgtagatgttacagcttccatatcttatatcttaaatatagactgacataacaattatgacaaactgttatattttctagttgctagttcttgcaatattaattttggcaccaaaatttccctacatgtactcaaggatgcttactttagccatgaataattttttttttcacgtgttgtaattatattttcaatttatcctgtcattttttcctgaaaaaggtacatacacagaataatttgataacttaaggtggcgcttggtttgagtgttttgtgttttcattttcaaagaaaatagaaaataagagtgaaaatatgtttgcctaaaatttagaaaacattttctatgaaaatatttcaaaaacaagcccaaaactgaaaacaaccaataaactttttcagcctttttctgaagaagtgaaaacacgatgtcactttagagtactttcttctcaaaacacgttttctaaatcttgaaaatctgaaaatgaaaataaaaattattttgagaaaatgaaaacagaaaataaacattcaaatcaaacgccaccttaattgtcatagacagttgtgcaatttttctcacgatatctctttcgtctgagtgcagctgtgcatcgctgttccttgccacatattcaagttgtgggctttcggtggaattatgtttcaggtaaaatcaaattaccgcactaaacttttgttttcccatcttctattattaaactaaagcattttaattcagagtaagagtaacacgaattttccaagaaaccaaacttctcccctcttccctcacgaagaaggtgaaggattgccgagatttttttttcctgttcttttatggccaaacgatagaaagtattctctggaataatgaatttgtgccatgtttgaaagttgatgattatgatatcatccatctttttggttcaattaacatgataaggaatgacttttttctaggttcctttggtcttcatcactaattatctgcaaaataaattcagaaactcgatggtacgtctgctatttaagcatattgattcataatatatcttattactccatcatcttgaatttgattcattggttttttaatttgtttttgtcttcatgccaggttggaaatatgattttttggttcatattcagtattcttggtcaacctatgtgcgtactgctatattaccatgacttaatgaataggaaaggcaaacttgactgaaggtgcacgtggataagcttttctgtttttggagtgtataattgatgtcgatatgttgatcaatattgttttccacgagtactttcatctaccatggcagtggctgctctgaaggatttccacctgatataccaggtcgcgaggctaattcatcttgatctatgtacttatcaactctcctctggcaattgtatcgatatatgcaattttgagagccatacactggcattgataactgccaaggaacagtgtagctgttttctgttaaatgttaattagtagagagctagatgtaaataatttatgctcaatatatttatttcttcctattcttcaagttccacggatgaatgatgatgtctttttatatagctgtttctttctgctacaaaacttacataacactttataggtgctgtttatgttgtttgctaattagaattgaagtttcaattcgataatcttcataatgaaggttaacatttaaaaattatgtaaattatcaaaataaaactataattctgattaaagaagactacaaacaacacttaaagaattgtaaagttttcccctatacccttaggatacttggaatgtttaaaagagtgctttgcagaaaactttagtaactgcaagaactatgtccaattttcattgactaaaaatagtttgatagtttatgcttgatctaaatctctcaatcaaaaaggtggcacgtgttgaaggttactattatcatttttcgtttaaactttataccttgttattgattactttattaatgattaataaatatttacaatatcgttaactgattaatgacatttttaacaataaaggttagttatatataattaattaataattaactcttgaatagctaaattaaatataacactggaacgtgtttagtcaatactttttactagaaccaacaagatctagtacaattggtaaataattgaatttttgaagtatgatgacagacattcaattttaggatggtaaaaaagattttattggaagaaacaaaatctattttaatgatatctatgcttagacggttgatctcataatttagattttaatgatttctatgcttagatggttgatctcataattttttgctagcaggataccttactttaaggagaaaaaagaaaactaaaaaaaagtgaggtttgaatggcaggttaagtggcaataaaatgaagtagcaggagcacctgatccaattaacacagacggcgtgcttatcacgtgacactaatgacgtggcacgtttcaattggcaccttgatccacgctctaacaaaaccaaagccctttatttttagcaccgacgcgacgccaaaaaggcatagtagtcag

SEQ ID NO: 389 - DNA, 10265 bp, Glycine max; identical to SEQ ID NO: 388

SEQ ID NO: 390 - DNA, 3789 bp, Glycine max
tagtaagaaaatgcgttagaacttactaggggaacgtgtttctctaaatgtttcaaataataaaaaaattgaagttaaatatagttaataaaaaataataaaataaaacaaaattaacaatataaaagtaatagaaaattaatgtagatcagaagaaaaatataaaatttaataaataatttaaaaataaaattatctaataaaatataaacatcatgtcaaatgaaaataattctcgttattaatagtgacaagtaacgcataataacattggttcttttaaaactatctcttttccttgagtatcataaaacgaaatgatgcatccgtcaatcactatgattcatatgttttctttttaaaaaaggaagattatatttttattggcaaaaaatacttttatgtatttatataaaagaggaagattctgattcatgttcccaaacgttaattattttgattcaggtctttttattatattttccatttaagatgaaataaaaaataactgcaaaataattattttgatataagaatgtggttgccaattgtttactatatttatatttatgtgaagattttattgttcagttaacaaaacttaaatgctacaggatttttataagttataactatatcttgcatgtctatcgctatcaagattttattacaagcttacaactagtataacacattgaaggaacactggaatgttctaatgttacaagtctacaaaaaagataatataaattaattaatcgtttattcaattaattaattaaccagtgaaagactatatctacaaccgcgtgagtggaaacgaattaactaatcaaggaaagattatccattatccctcaccgtgggattccaaagccatctccttaaccgttagattacttgagagtgcaatggcgacaatacccccccgaagctctatataagcaaccacagcatttccccgaccatcacaacaacaaaccaacaaagatcttccttacaaaagtttgttttcaaagtgtgttttgtttcccaaatcctactcttgtgaccacaacccttcctcctctttcttttgaaacctctttttttctattccccaaccaaacaagcaaacgctactcactcatcatcactgagatcatggctcctaatatcaccactgtcaaaaccaccatcaccgacgctcaagccaaggtcgccaccgatcatggtcgtgcctacgtcaccttcctcgccggaaacggtgactatgtgaaaggtgtcgttggcttggcaaaaggtctgagaaaagtgaagagcatgtaccctctggtggttgcagtgctacccgatgttccccaagatcaccgcaacattctcacctcccaaggttgcattgttagagagattgagcccgtgtaccccccagagaatcaaacccagtttgccatggcatattacgtcatcaactattccaagctacgtatttgggaggtacgtgtatatatatatatatattttcttttatccacgaatgttaatttgttttgttagctttattataaatggaaatgggtgaattcaaacccattattttttgtctctttccatttttctggatcaatcttagtaggtgtgcatatacaatatgtatgtcattactttgtgtttgatgaggagtttaattaaattaacgtgcaatttttctttattgtatataccagtttgtggagtacagcaagatgatatacctagacggtgatatccaagtttttgacaacattgaccacttgtttgacttgcctgataactacttctatgcggtgatggactgtttctgtgagccaacttggggccacactaaacaatatcagatcggttactgccagcagtgcccccataaggttcagtggcccactcactttgggcccaaacctcctctctatttcaatgctggcatgtttgtgtatgagcccaatttggctacttaccgtgacctccttcaaacagtccaagtcacccagcccacttcctttgctgaacaggtatttaattactgagttaattaatcttatacaatattaatatattataaggtgtaaagagtatatttatgttggattattggattgcaggattttttgaacatgtacttcaaggacaaatataggccaattcctaatgtctacaatcttgtgctggccatgctgtggcgtcaccctgagaacgttgagcttgacaaagttaaagtggttcactactgtgctgctgtgagtgttcaattttaattgaaatgaaactggaatttaaactttggtgtacagtaagatagaaattttaatttggttgaattggtgtgacaggggtctaagccttggaggtacactgggaaggaggagaatatggagagagaagatatcaagatgttagtgaaaaagtggtgggatatatatgaggatgagactttggactacaacaatccactcaatgtggataagttcactgcggcacttatggaggttggtgaagtcaagttcgtccgtgccccatctgctgcttaagagtgtctttggaaatcaagtgtgatccaagtacatgtacaaagtcatacatcattacattaacttttatgtatttctaaaagtcatacatcattacattaagttttatgtatttctaaagtcttaagacttaagaggaccttttttatgtgtcccgcttttctttttttctttttccaattctgtcattgtaaagcagtgaataccgtatccttaattttataaatggatatgaattttattttgtactttctcttttttcctttgctgattgatctatttccttttacttccatgataaagcacatgcgcactgtaacggtgaccgttgttgtgacaccaattcttagtatcaattaccaattaaccttgcatacgtacaaacgaaaatgaagggaaatagtaaattaaaaattaaagctttcactgttgctcctcctcctcctcctcctcacattagttgcttgaaatttcgcctgtacaatcgcatgacctgctgggcacgttaatacttatttgttaagcatgaaaggggatcacataaaaccaattaaggtgttgttgttgaatcaaaataattaagaaacttattttgatttggaacccgtgactatacgttacaacattaacaaataatgtgtaaatagcataatataaaaatatcacttggagagcttttggatttatcaaaggtgcaggctctggtgccttcatttgaaactgttatggtgcctttgaaaatacaaatgagatgtcttcatgtggattcaccatttccatgtcaatattgagctggccgttttaaacttctcaaatattatatttgtttaaacaatatttttaggaccttatgaaaaaaaatctttttaggacttgattaataaattaaaacactttaatgctaatatttatttgaatattgtaaaaagtgaaattgtttttactattttgttctctcccttgtcggagagtcctaggcagtcaagcacgataggggaagagcatgaacatgtgacgatgaaagtcttgttgaaaatcaaaggttatttgccttgtcttgtttgtgaatcattgttaagtctaaagtccaaacctatattaaacttgtgtaaaaagactcattgggaacgcatagaactgaacagagtgaaagtgtactagttcgaattgttctgagatgcttttagttggtttttcttttcaacataacaaagaactgtggtggaggattggtacctactaaggc

SEQ ID NO: 391 - DNA, 2481 bp, Glycine max
taaatttaatatgggattttaacagcctacatcgatcatgacttgatctaggctaggttatatggtacaaatcaagttttctcggattttttcctcatttaatcataaccttgagttagagtatttttgtaggaccaacaataacttgtggtcacttacattggactcgtgaccaactcaattagaacccacttgataaaatatatgattcagactttaagttttgagcacaaattagatcttatcttttttgttttttttatcacaaatacgatcatagcatgatatatatatagacttggcccacaaaaacttaaatatttttttatggtatcattccaaattccttcattacaaccttgtgaagaatctcacatctttttagtgattaaaaaaaaattataatattgcttacaatttaaaactgaaacaaaataaaactacaaaattaaaaattgaaaaatgattttgattttgattttttaaaataaaaatttaaaactaaaaaggttaattattctgtggtccctatacttgtaccaaatttttaattagattgttgaattttttttaattgaatctctaaacttttgattttaattggatctcccgtttaattgatgttatgaaaattaaccacaaacatataattaatgacgtagacaattgactcatacttctaaattaaaatatgttaaaaatatatttgagtcagtactaggctaacacctgaacctcttatccagttttccctgtataaaatgctaatagacacgcctagcccaacgtgggagcaaagccagccatgatatcctgcatgtgtgccacctttgaaatgcaatgcagaaaagaaccaagatatcactattcactactgctccatgactcagaaaagaaccaagtcatcacgtttccatctgcatgcaaatgatcctcttaatataaataacccacttcagtggctcttttaagtaatctcttcacagaagaaaaaagagaagaagatgggtttgaagaacaacatggtggtgctaaaggtgtgtttggtgctacttttccttgtggggggtactactagtgccaacttgaggctgagtaagcttggcctgctcatgaaaagtgatcatcatcaacactcaaatgatgatgagtcttcaaaaccatgctgtgatcaatgcgcatgcacaaagtcaaaccctcctcaatgccgctgttcagatatgaggctgaattcgtgccattcagcttgcaaatcttgtatttgcgcattatcgtatcctgcacagtgtttttgtgttgacataaccgatttctgctatgaaccttgcaaacccagtgaggatgacaaggaaaactactaatgaacaagtgttatgcatgtaagctctctctccaacggacaaagccccctttatgctttgtttgttatgtaaggaatgactaaataaacttggaataaaacttcctctcttttcgtggcccataatttgctttctgcaaatctgggtcttcttcattccaatgttaattaatttggccaattttaatttatagtttttcgtttgcatttggttctatgatttcaggatttataaataaaaaaatgtataagttaaccaaatagtacctaaaaacattttcgtggaacacttatatgagttgtttaattaatttaaataatgttgtttaactttttttgattggaacaagagttccctaactatacaaacaccttttgtataggtagtgcccaatctgaactaccaagtacaaattaacttccttccattttcttactctcaaatgcacaagatactcctctgttggaaaataaatttgtatgttcacgatccaagtcatcatataatcaattctaattttaataataaagtattattttattttcattatcatatttcagtatttgattaaatgatccatttgataatatccttgattaaaattaaagacttattattataatagagattatgataatgagaaataagtttgttctaattttaatctaaatcgttttttatcataggattattgtaaataagatatcaataatcgggatagattaatatatatgtgatagtatttattagataaatattaatagatctcatttattaatttgcatatatagatgagttacatattgatgtgatcattgaattaactcaattgaaattttctaatgattaaaatttaccataaactgtcaatagaaaattctcaagaagaggtataatagttttctttgacctgagattgtcatagtaattaacatgttatttgttgtattttgattctggacacctaatgctttagagcacttgttgaataaatattggatatgattaaatacctgtagaattagtgattaatcaagaaggaatccatcaactcttggtaatgagtttgagttctatgaataaaattatatcctagccaggaaaattaaatgaaagaaga

SEQ ID NO: 392 - DNA, 10134 bp, Glycine max
aacttaatcaagaattgacgtattattatatttatcaagctatatatataattagcagttattacttaacagtgagacagagtagagaaagcgaagaacaagaagaattttgcatggaatctagcggttgaggaatggaacaaaataaaagcgactggtgtgagaattggaagacgaagacgtgtcgaagaacttacttcttggccgtactcgtagcgattaagaaaaagatacggtacgtctcaacttcaacaatatctttttgcaaacactaaacatgacaaagacaaatattccttattagaatttgtttcaatataaaattaaaagttcttttgagaaaaaaaacttgtatatttttagtaaataaattctaagcaatagacccttaatctttcattagtccctttctcctcttatgctcaattcccataataattttttccgcttataaacccgtcttagatttccattttccaatcctcaccaccgcttttcttaatttattcaaatcagattcctcaacacaacaagacaaacaacactaccctcttcttctttttttctcttactctcaataaatttatgtcattattacttattagttaggcttcatttatcatagacgatttctttgtatttaaaatttaaaattttccaattacttaatagttaatatatttaatttaatgtcttataaatatagaatgcatcaagtacttattgcatacaagaagtaagaaatttgaattatttgtaaatatatcatttatattttaaatttatgaaaataacttatattgttatataagattaattttagttattgacatcgatttaaaaaatattgataatttctaaaaaaaattatttaaataattattataattagtaattagtagtgcacaggtaaattctaacttgatacagataaaaaaaaggtaaattccaatttatgtagaaatataaatacattattttagagaacaataatagaaatctgttttttttttttttttggagaagagaagactgagttagaaaacacgctcggtcttcttctccaatggcgatttccgatgagcctgaaagtgtagccactgctctcaaccactcttccctgcgccgccgtccctccgccacctccaccgccggcctcttcaattcgcctgagacaaccaccgacagttccggtgatgacttggccaaggattctggttccgacgactccatcaacagcgacgacgccgccgtcaattcccaacagcaaaacgaaaaacaagacactgatttctccgtcctcaaattcgcctaccgtccttccgtccccgctcaccgcaaagtgaaggaaagtccgctcagctccgacactattttccgtcaggttctcgccgttaacttctactttacgattactacaactctttaactatttcaaactcaaccagaacggtgccgttttgttcccgttctgcataataaacttctcaatctcaatgcaagcgaatcgtagtctttgaggtgcttaaaatagtgtatgctactgctagttagttcttgtttatttaatttatgtgtactagaaactagttatcaatttatgatttgaatttaatacaattgaattggtggatcaggtttttgtagcaattatcgtggtttggtttataaataggtgtgatgagtctgatatgtaattatatttctttactaattattgaatcggttgcagagtcacgcgggcctcttcaacctttgtatagtagtccttgttgctgtgaatagccgactcatcattgagaatttaatgaaggttttgcttcttccatgtttaaattgtacattcacctgcaacaatttttctgttcttttatttatggtcttgattttgacggttcaggttttattgtctgctttaatgagtgttttatttgttctgcagtatggttggttgatcaaatctggcttttggtttagttcaaagtcattgagagactggccccttttcatgtgttggtaatgagtgatgaattcccttgtggattaactgtgtactgtgtaattgttttgacggttgcttcttgaaatgttgtttaacagtatgtggttgtgcgcttggtttgcagtctttctcttgtggtatttcctttcgctgcctttatagtggagaagttggcacaacggaagtgtatacccgaaccagtaagtgaccaggccatgtgagcttttattagatttcattcgttgtataatctaaaatagttttgggatatggttagttgtatgtgctattattaactgtttaatctttaatatttgcatacattggaatattatattacttgaatattgcaggttgttgttgtacttcatataatcattacctcaacttcgcttttctatccagttttagttattctcaggtcagtttagttctttgtatacattcttcaaaatttattctagggctgcagttgatgaccttttcgttttgacatgtgcggttacaccatgtgtccattttgaaagaatttgcttatagaatatggttttaagttgataatggtgttatataacaaactttgtcactatactgcacaggaattttaaaaacttttatcatttattaaaattatttgagaaaaaatttaaagccgttgggtgaaccttagtttaatgtttggttcttatgattttgcaattgaattgttgcaaaatattattgcattgctatatgaacattgagcaatgaagttgaatgctgcgggataaagtaattatacagttgtgcgttcttagtcatttcatagataaggatatcccagaaagatgattactaacttgtagcattcctttgcaggtgtgattctgcttttgtatcaggtgtcacgttaatgctgttttcttgtgttgtatggttaaaattggtgtcttatgcacatacaaactatgatatgagagcacttaccaaattagttgaaaaggtaataaatactctctgtttaaatggagagaaaatgagggggagagaaaattttgaattttttttcttgaagtcaacttttccctcttctctttaactaaacaaaagaaaatgtatgattatgtgttttttctttcatctaattttttccttaaccaaacatattcttaagttccacttgacacttgtaagtggctagataaatatcacaaaatgtcatcttcacttatttgtatactttaaagatgacagtttgttgtacaatgattagtttttgaaccagaacatcctgcttgacttagcagtagcttatggatcatgtactattaaaacttcataatatgctaaagtacagttttatttcatctaaattcgaattacttccatcctatgttcccctttattgcttccttatatctagatgattagctcttcacatgtgtgaatgtgccatagataaaccatctgttttccctccttattcaaacatgtttgctgtgttatagggagaagcactgctcgatactctgaacatggactatccttacaacgtaagcttcaagagcttggcatatttcctggttgcccctacattatgttaccaggtagcagtactttcaagtgatttagttaatttttggaagcaatttctttttatttgtaattgttgtggtgttgcctcatttagattggcctattttacatttgcattcatttttcttgtcttagattgcttataggcacaaccatgtgcagttgcttacccatatatctttggtgtggactatgtctgaggtttttagtcagtgtctaattggacatgctgttgggaacccagaaacagaatacaagaaaagaatgcttcttgtactgaaaaattgaatgacaacaaagaaaagaggagaattttgctcaaagggtttctccacagcagagattctcagtttacaaatgctaacaaatttgaatgacttcccccccccccccccccccaaaaaaaaaggtataattgctctaactaataatcaaactaattgctctaaccatcccaactaatttccccttccctctctcctaactccgtaacagggtgaacataattacactgctaggaattaagttcccatctaaaaggtataattgatccagaatgttgagttggctgtgtgatcacttgattcttacatagtaggatttctccgaatgactttaattattgtctattctattcctttcagcaaatttctccatttatcatcctgtctttcctttccatcttctaattttggccatttgaccttgttcatctcacattcaatactcttttctatttttttggcatgcgcttagacaacacaacattttgtagcataaaatattgtgtaatgaaatctatagcaggaatctcccgaacctttctcatgctccccctttacttccattcatacaaaattcccaatgtacaattcctattgcaatctgctagtttctagacacaacctgctaatcaatgcaagggggaggggagggggggtagtagccactgttagtcaatgtgttcttcaatctgcttataattctgcttgcttcttgcttttatatgattagaagctaagaataagattttaagggaatgggtattacatgactccctggcataaaatgtagcatacatttctaatgctttgtgagaatactggattggctttggcatcttcagtgtttacctaagttgcagaaattttgcttgcggttctttaagtaggtttctgcagttcatttgtctttgccttttcctgcataaatgtatatccatgtagattgcatttgttatttttttcttctgtgagcaaggtttttcacatttttatttgcatctattttgttttatgaactgctcttttagccaagctatcctcgcacaccttatattcgaaagggttggttgtttcgccaacttgtcaagctgataatatttacaggagttatgggatttataatagaacaagtaagcagttcctgttaataaattgtgttcatttctactttttttcctttcttttttttttgtgcatttttttcttcaggtttatttcaccaattctactggtattctgacattattttgattgtaaaattctgcagtatattaatcccatagtacaaaattcacagcatcctctcaagggaaaccttctttacgccaccgagagagttctgaagctttctgttccaaatttatatgtgtggctctgcatgttctattgctttttccacctttggtattccatctcttgtttggttcaacatgtgtgtgtgcatttttcttataagatattagtctgaactatgaagttaatttcacctgccataaattgaatagctgtagttcttgtatcttttgtttaatgccttgacttttgtaccctggcaattttcagatgatgatgatgttataagtttgtaattgattaatctttcaaatcatcgttgaaatgatatccaccttcctaaacaccttaaatagtaattacatcatcaatgggaggatctagctaatttaaaggtgtgcatgtagagactattgttgtctggactctggagtatatacttcttaagatataaaattaactttatagcctgtttggtgtgccacaattgattaatttaagtgacactctgacagatatacgaagggattttagagccttattttattgatggatttgtatatttttcctgtggccagtgaggatattttattcatgtatgcttgatttttctcctctttaatagaactactattagaaaaaactagatctctttgtgcatgcgtaaatgttgatctgattgtctcatttctagatattagaaaatgttcacctttgtttttttaagatttagttcatatttgaggcagcttatcattggagtgactgttccaatgtaggttaaatatcctggcagagcttcttcgatttggtgatcgtgaattctacaaggattggtggaatgccaaaactgtcgaagatgcaagttatttgtcctgatattttgttgtttacttacagtattttcagtctttcataaagagaatttgtgacttattgttttcttgtatttttgctgttgttgctgcttccatcagtattggaggatgtggaatatggtatgtctctttttcagacttaattttgatgaacaaattgattttcttgttgtcagcaaaatgattttctggtttcttgttgggatgaaattcaagtgaacacacacacacacacatatatttgatataactatcccttaagtgtataatgagggttgactactctccgagactattttaacaaaggaagaaagagaagttacaacattttgccatcttactgaataaatggttttaaaactgtctttcagaacatatcattgattattcatcacttaaagttccaaaccattagtataatctgagtggaatcttttacattgcagcctgttcacaaatggatgatccgccacctatattttccatgtttaaggcacggtctaccaaaggtaatcaagcatcctcctgtgttgctgaatggatcctgaatttatttggtctaaactctaaaacatttttaggatttgtcagtctctgtttaccatctcaggttgccactaagatgatcacatttaacatagttaaattaaaaggaacatgtatgttagttatatcctaataatcacagttatgtaaaaacttatcaataaacctattacataagttttttttttttaaaaagtatgtatatattttttttgcactaattgtatggtttgatatgtttgatgcactggaggaatatgtagaaagtttgcaattggtagacaatagttgaacttcatttctgttctgtcgtttcagataaatgactttggaatgtataaacttgactaacacaaacaagaactgcaaacgaactccattatttttttttcttatgtaatcatggttgatatctttgtgatttttttccttggtctttgctatcaacaatttcctatcaacatagttgtttctcattggttaatattttgattggctcttgttttttaaagcattattggtattttaattttcagttctagataatgttttgatttttcatcattgtacaggctgctgctcttttaattgccttcctggtttctgctttattccatgaggtgtgttgttcatctctctgtacagccttctctcttccttttttggtattatgtcattatggttttctgcttgagtatttgtctgcattctacactgatcaatgtcaggaagcatcttgcaatcaatatatttttggaatattctttccttcttttccttgggctgtttggactgtgttaggagttagatagaagggaagggaaaattatttacagacggttagagttgttaattagtcagttacaggatttggttagatataaatagggggtattaagaggaaatgatccattctatttgttatcatttgagaattgagctttgctattttgaaaggaaaaatcctttgtgagggggaaacccttggaggagagttatctttcctattttctgttttagatgataaaagtgttcttttatttctttctttgctttgggttcgtaacagactgtgggagagaactgaaaattagatactaagttgtggctgatttgttaaaaattggtataggacctacgttacttgtctttgaactatctacaacctcatatggcctcagaaaccttagccttaggcagctagttaccaaaatctcaagtaacttgtagcctgtctgtaccttggcatgtgtagatgttacagcttccatatcttaaaatagattgacataacaattatgagggactgtcacattttctagtttccacctgagttcttgcaatattaactttggcaccaaaatttccctacatgtactcaaggatgctttctttagccatgaataatttttttcacatgttgtaattatgttttcaattaatcctgtcatcttttcctcctgaaaaaggtacatacgcagataagaataatttgataacttaattgtcacagacagttgtgcaatttttttcacgatatctctatcatctgagtgcagctgtgcattgctgttccttgccacatattcaagttgtgggctttcggtggaattatgtttcaggtaaaatcaaattaccgtattatacttctgttttcccatcttctattattaaactaaagtattttaatttagagcaagagtaacacaaattttccaagaaaccaaacttctcccctcttccctcacgaagaaggtgaaggattgcccagattttgtcttttcctgttcttttatggccaaatgaaagaaagtattctctgaagtaatgaatctgtgccatgtttgaagtagttgatgattatgatatcatccatacttttggttcaattgacatgatcatgaatgcccggtttttaggttcctttggtcttgatcactaattatctgcaaaataaattcagaaactcaatggtacgtctgctatttaagtatatcagttcataaatcataatgtatcttataactcccatcatcttgaatttgattcgttggttttttaatgttattttcttcatgccaggttggaaatatgattttttggttcatattcagtatccttggtcaacctatgtgtgtactgctatactaccatgacttgatgaataggaaaggcaaacttgactgaagctacggccattacattttaaaggtgcacatggatgagcttttcagttttcagattgtaaaattgatgtggatatgttggtcaatatttgttttctacgaatgctttcatctaccatggcattggctgctctgaaggaattccacgggatatgccagttcacgaggctaattcattatcttgatctatgtacttaccaactctcctctggcaattgtatcaaaatatgcaattttgagagccatacactggcattgataactgccaaggaacactctaactgttttctgttaactgttaattagtagagggctagatgtaaatggtttatgctcaatatatttatttcctcctagtcttcaagttccacggatgaatgatgtctttatagcagtttttttcttctacaaaacttgcatatcactttaaaggtattgtttgtgttgtttttgctgatcataattgaagtttcactttgataatctgcatgatcaacgttaacattaaaaaatatatatataaatcatcgaaataaaactataattctggttaaagaacagtacaaacaacacttaaagaattgtgtacaagtttttccctaaacacttcatgaaggttacttggaatgttcagaagagtggctttgcgtctggcagaaaactttagtaactgcaagtgctcggtccaattttcgttgacgaaaaattaatggttttatgcttgatctaaatttctcaatcgagaaggcgtattatcattttcgtcgtttaaaatttatatcttgttattgatcagtttaattattggttagatatttataatattgttactgattaatgatatttttaacaaaaaagtttagttatagtataactaattaataattaactcttgaatagttacattagataaaacgaggggtttgtgtgaaacacacaaacgtgtttagtgaaaactctttactggagaaaactaaaaaaagtgaggtttgaatgccagattaagtggcaataaatcactgtagagcaggagcacatgatccaattcggaccacccaaatccaattaacaaatttcaatgacggcgtggttgtcacgtgacacttacacatggcacgtttcaattggcaccttgatccacgctctaacaaaacaaaaaccctttaatttttttagaagagtaatgctagctgaattctcaatcaaagactttttataatttaataaaaatcattaattttatcatattttatatcttattttagaaaaaaattattaaataaataacaaaatctaaaaaaatgatgattccaataaatttataaaaaaaagtataactaatatttctcttttcatagataaatttagca

SEQ ID NO: 393 - DNA, 2903 bp, Glycine max
tattaatttatttttatgtattttttttatttaaaataattttgaatttcaaaagaaatttctagaaatattaaaatgtaaacttgtttaaaatacccaagaatgatattttgatgtactatatccctatgaataaaataaataggtcaacagtaatatattttaaaaatactatgaagattaacaatatattaatatgccatatatcataaaattttattgaaatacataaaattgagttatttataatatttttttacgttcttctataatttttataataaataatttattttttatttttttaactagtgtcctaggacatttattagtaatacccatatattatttaataatcgtaaatattagagtttaaggttggggttcatcattttgacaatttattcttctatttctcatgttacatcataccatgcatgtcttcatgttaatacttctatcagtgtcatcatgttaacataaattgttaaattgaaactcaacaaaacaaaatggtacaattaccatacatatcagatagaaatactacatagtactgtcaaaaaaagaagaaagaaatacacttaagcctaatttgtacataataaatactgtcatagattcaatatttatttgaactagtgtttaattaaattactcaaatagtagtatttaattgggatattgaataagttgaagatgacagaggtggtagtactagtactagtaaggagttatagtaagtaaaggatattttggtgatatttaaataagtccatgggttcggctgtgaaagtagttacggctatgttaaagggatcgttgggtcaattcacttccctcccaaacccgaaaacataataacattagacgatagagagaagaagtacgttgttgcagggcagggatatttgtttctcactctctctcatgttcactcaacaacaacgacgcactcactgacatcaacactagtttcaggtgctatctcatccaccaaatgcagcaaatacactccatgcccggagggaggtttttctccggctccggatccgccgaccggaggctccgaccccaccatcagaaccagcaggccttaaagtgcccccgctgcgactctctcaacaccaagttctgctactacaacaactacaacctctcccagccccgccacttctgcaagaactgccgccgctattggactaaaggcggcgtcctccgcaacgtccccgtcggcggcggttgccgcaaatccaaacgctcctccaagcccaacaaaataacaccctctgaaaccgcttcaccgccaccacccccgcaccccgaccacaacaacaactccaactctcattccagcagcgagagctccagcctcaccgccgccgctgccaccaccaccgaggccgtgtcggcgccggagactttaaactctgattccaacaacaacaacaacatgcaagagtcaaagttgttgatccctgctctggaaactaataattctctggagcagggaacaggggactgcggtggtatcttctctgaaattggtcctttcaccagtttgatcactactactacttccactaatgaacctttagggtcagggttcgggttcggtaactccactctccccgatgcgtcgtcgtttcagtggcactaccagaaggttagcagtaacaacgaagaattgaagttgccggagaactcctttctcgatcacaccgttgatttgtcggggatgcatagtaaaaccagccacgggggaggattcggatcgttggattggcagggcggtgcagatcaaggtttgtttgatcttcctaacaccgttgatcacgcttactggagtcacactcactggtctgaccacgacaattcttcttctctctttcatcttccctgaaaatgttttcacgcctcttctaaatcttatctcacctttttttttatttcttatataaatttaactttaaaagaagaagagtaaaggagattggaaatcaaaaccaaagttttaaaaaaatttgaaagagaagtggaaggacttggtataattaattacgcggtgtatatttttttttgaagttataaatttggggggtgattgagcttgatattaattagtgatgtgcatgcacaactaacttccatgttagtttctacagtatctgatttctttctctcttttttgttttctgagttcaggttttaatatatatgtatgtggaatttgattgattaacagagaaattatagcagggtgttttaattttgtcatccacccgtcgtccttgtttatttagtagttggttgtttaggtttgtaaattgtaatcggatttttatgtttgttgtgtgacgctaatccttccgtaccattactcaacagcatgactatggcaacactacctatttaatattattatatgataacatgttaataatgaattaagaaatgagaggatgaggtagggagaagacattgtattggttgtatgttaaattctaattctaattctaatctaactcccttgttttttggttttcaattctattgtgaaattgatgggagtctggtatgtggggatttcattagtgagattaagataagtgcagaaaatgaaagtaagaaaatttgggattgggagggataggagtaggttggggcgtggggtagtgatgagttgcatgcgcgatggatcatgattcttgagtccgcgtgcgggagaggaagggttatgaatgccaaaaaagtggggacaggttggtttgggtggcaagacaagaatgtgatgtgaggagttggttgggttgggttgtcttgtggtggatcatatttgttctgtatgctatggactaaacataaattttcacccatgagtctcgaacacaattcctaagaga

SEQ ID NO: 394 - DNA, 3268 bp, Glycine max
  modified_base (1)..(285): a, c, t, g, unknown or other
nnnnnnnnnnnnnnnnnnnnnnnnnnnnnnnnnnnnnnnnnnnnnnnnnnnnnnnnnnnnnnnnnnnnnnnnnnnnnnnnnnnnnnnnnnnnnnnnnnnnnnnnnnnnnnnnnnnnnnnnnnnnnnnnnnnnnnnnnnnnnnnnnnnnnnnnnnnnnnnnnnnnnnnnnnnnnnnnnnnnnnnnnnnnnnnnnnnnnnnnnnnnnnnnnnnnnnnnnnnnnnnnnnnnnnnnnnnnnnnnnnnnnnnnnnnnnnnnnnnnnnnnnnnnnnnnnnnnnnnnnnnnncagtgaagtgtaacttaatcccgtggtgaaagaaatatatatatatatatatatatatatatatatatatatatatatatatatatataaattagtaaattgcataaataatattagatgatactttttaacaaaaaaatcacactttaaatttcttaaccattatataagaataattagtgcttagcaaaattatttttatttaattagttacttcaacttataggaatttagtttagttcaagtaagtgttgtaaatttttaatatggtgtttaattctttgggataaaattttttcatcccatcattccaaactcttgtcaaactgatttagctgtgcataattattcctgacacgatctagtacttaatgaacaacgtactaacatagtagcattctaagatcttttttacattaacatcttggtacttgatttttttccttagatattcgtgtgcatctaacaccgacaaatttgtcatggacaaaaattcacgccaactaacacgtacaagccaactaccaagcaagcacgttagactaaaacaccatgtgttcaactaccactctctatttcgctttcactccccattcttcttcaattgtatttgtaataatacccttccactcccctagtcctaggaattaacttgctcctattaatacctctaaatcatttccttattctacacacacttctttatctgcatctaattcaatatacaacactgaaactttcaaagctcttttgagaacttgttattgcaatggctgacatagatcgctcctttgataataatgtttctgctgtttctactggtacccttttagaatccatgtcctcaacaatcaattctgatagctagataagaatatatcttgagattagtttttgatgggtctataatattataatataacatgcacctacaaacttgagagtacacactcatgattgatctctcttcagttttatttcaactattgttctgggtcacttcttggtctttttttatgccattacacttgtcaaatttggaatatatactttctgaatcttattcttatggccctttttatttcttgttcgatcgggatatcaccttgttatcatgatttctgaaattgtatatgcaagctttcctttctcttacgagttatattaaatattttggttttgattttcttaatgtgtgctcatggatatactttaagaagtcaaaaattgaaccaaaaaaattattgaaaataaattaatatattgaaagcacagaagttatatattcatttcattttttagtaatttaaactatttaacaagatatgacatatatctgtttatgcatcacaaaatttgttgtttttaacatagacgtataaagaattgatttgtgttttgtagagaaatcaagccaagtttcagatgttgaattttctgaagctgaggaaatccttattgccatggtgtataatctggttggggagaggtgagtatgatatgttttgttctaccattttcactttcttcccaaagtctctctctctcttttaaccatttgaagataaaggttatgaagtaataaatgttatgttctcccttaggtggtctttgattgctggaagaattcctggaagaactgcagaagagatagagaaatattggacttcaagattttcgactagccaatgatcggtggcagaaaacgaagcaaggaaatttttggtgcctacaagtcattacagtgactttgtggggatatgaaatggaaattgatcctattaatcatatgggtacttatatttgcattttgcggtaaccaacaaaaaggggcatgccattctaaaagcccttatgtttaatgttacttaattttatctttgtaatgttcccaagtgttttaggcaatctatgattcagatctgttcgatcatggcaagaacagtatgtacttaattaatgcagatcacctgcatgtgcatgtgtatttctggttcatttagccttcttgctaatggttacaactagctttgccttggcctatagcattggatttggaagcggattttttctttgcatgtatacacatacattaagtgtattcgtaaggcatctttattttttgtgtaggtttaatttcttttatttgatatatgcaacatacaattacttttttttataagacaaagatggtggagtaaaatgttacactagtacttgtgacttgtccattacaagaaatatcataacaagagaagcttactagtggggatagatcactactcataaaatgacaggtatttttcatccttgctttaattaatttataatgagcttttcacctttatcatttttaccacctcatttgagtttacatgagaagaattaaaacgcacggcttggtttctatgtatatctatattgaccatattaagttcatctaaataagttttgaaaactcgaactcattcctcttattttgtcatccttaaatgtgataaaaaaaaaaagagttttacccaaaaatggtagtcgccagtgggtttatgcgcatctagccacaattagctaggcaatttgcatttttgtcaaatatactacatgaaacagtattacaggagaaaaataaatgaactattgatggaatctatgttacatttgcaaaaagacacacaatggttaatctctttagtctatatattacacctcttcttagtagatggatggtattaattaattattacctttcttgcaaatgccttgatttttttagagtaaatactacactagagattattgtactagtatagttttctatctagatgatggcaatgactatgatcgaatcaccctgttggctaatttcattgaatacttgcatgtgggtttcaccttccatgtccatagatatctaacattacaatattgataagactaaatgagttattagcttatatttgagttgatttcaaagttggacatt

SEQ ID NO: 395 - DNA, 3843 bp, Glycine max
tttaatattttggatgaaaataattttatttaacttttaattgaattttagattagttaagatttttttcttgatatattgaaagattaagaaaaaatactttatttacatgtataagcttaagattaaaaccctaattatatataagatagaattatctgttaactattatattataccatatcagttgtcacaacatgtgtttctggggttattgcctcttgagttcaattgcaacttgttaagcaaatcagccggcttaagacctaagcaacacaagcaagggctttaggtttcaaaaaaaggtttcaatttttttttaatattaatatatctaaaaaaattattgtaaaattatatttgaaaataagttttaattaaaatattataactaaccgttaatctttttattggtactataaataataatcaatgagcaacaattcttcaccgacatcatatctttgttttaaaaaaataataattttaataaattatttgataaataaataaaagattttattcttaaatttattttaaatctctttgtgtccttgaaaagtccatgatacaggatgagatatttgactatttgactagaaacgtagtaggtgatatatggacatttcctggtttattttatattcttaaaaaataacaattcaatcgaatgtagttgccaaattttaataaataaataaaaagaagcattcatcgaattcttcgtcttttatgagtgtaaaacaaaacattgaattaggaacaattattatcacgttacttaaaataaaatatactaaaaccgttgaatgaaatcttcatatttgataagtgtaggtagacccacaacacaaacattgaatttgaataaatttccccgtacagtgtcgtccactatgtggctataaaatggaagcattgaaggttgtttcctcaggccaagatcttggatagtaattaacctcactcaaactcgggatcacagaaaccaacaacagttcttgcactgaggtttcacgatgttgctggaacttgcacttggtttgtttgtgttagctttgtttctgcacttgcgtcccacaccaagtgcaaaatcaaaagcacttcgccacctcccaaaccctccaagcccaaagcctcgtcttcccttcattggccaccttcacctcttaaaagataaacttctccactatgcactcatcgatctctccaaaaagcatggccccttattctctctctccttcggctccatgccaaccgtcgttgcctccacccctgagttgttcaagctcttcctccaaacccacgaggcaacttccttcaacacaaggttccaaacctctgccataagacgcctcacttacgacaactctgtggccatggttccattcggaccttactggaagttcgtgaggaagctcatcatgaacgaccttctcaacgccaccaccgtcaacaagctcaggcctttgaggacccaacagatccgcaagttccttagggttatggcccaaagcgcagaggcccagaagccccttgacgtcaccgaggagcttctcaaatggaccaacagcaccatctccatgatgatgctcggcgaggctgaggagatcagagacatcgctcgcgaggttcttaagatcttcggcgaatacagcctcactgacttcatctggcctttgaagtatctcaaggttggaaagtatgagaagaggattgatgacatcttgaacaagttcgaccctgtcgttgaaagggtcatcaagaagcgccgtgagatcgtcagaaggagaaagaacggagaagttgttgagggcgaggccagcggcgtcttcctcgacactttgcttgaattcgctgaggacgagaccatggagatcaaaattaccaaggagcaaatcaagggccttgttgtcgtaagtttccttcttctctcctactttattactttctttcattcatcatatgtattggcattaaatagtatactatatgagaaaatatgttacgcactcacggtgtaaagatatgtggtgtttttttaaaaagagatacagaagttgcttttatgcatgtatgttaacgtatatttactcaagtggaaactaattaattctcaattttgggtatgtaggactttttctctgcagggacagattccacagcggtggcaacagagtgggcattggcagagctcatcaacaatcccagggtgttgcaaaaggctcgtgaggaggtctacagtgttgtgggcaaagatagactcgttgacgaagttgacactcaaaaccttccttacattagggccattgtgaaggagacattccgaatgcacccaccactcccagtggtcaaaagaaagtgcacagaagagtgtgagattaatgggtatgtgatcccagagggagcattggttcttttcaatgtttggcaagtaggaagggaccccaaatactgggacagaccatcagaattccgtcccgagaggttcttagaaactggtgctgaaggggaagcagggcctcttgatcttaggggccagcatttccaactcctcccatttgggtctgggaggagaatgtgccctggtgtcaatttggctacttcaggaatggcaacacttcttgcatctcttatccaatgctttgacctgcaagtgctgggccctcaaggacaaatattgaaaggtgatgatgccaaagttagcatggaagagagagctggcctcacagttccaagggcacatagtctcgtttgtgttccacttgcaaggatcggcgttgcatctaaactcctttcttaattaagataatcatcatatacaatagtagtgtcttgccatcgcagttgctttttatgtattcataatcatcatttcaataaggtgtgactggtacttaatcaagtaattaaggttacatacatgcacatgtatcatctcccatttgtctttgtttcgtacgtaagacaatttttttttcccggccaaactcataatcataagagataaatcatctcataaactcataaaaattaactagttaacttgatatatatataaaacacaaaacaagtgtgtaatttacaaagatactaaatcagttcaaaaaccattctgtttgggaggtcatagctctatgatatgtaaatatcaccaaggtcattgtaaattggttaattagatgataaaagctgcagcgttgttatgagtctttaggagttgtcacctattttctctctttagtgaatttgcaaattgcgatggatggtccatgatccacgtattttgccatagtattaatataaagatacccgttaatattttaaaatcacgtatgtatgtgattaaaagtcaattaacgattcagcaacataaagtaattaacttttaaaaaattaataaaatggataatttttttttaaaaaaaatacgtaaataagtcagtcatatttgaaaaacacaatattttgggacggggacggaaggagtacaagatattatttacattagttggttttgaagaggtttgtgggatttcttggtttggtgaaacagaggataagtgaaggttcaaataagagttccatataaaagatcattgcacaaaatcaaactacaaacagttccacttaattatatttacttaattaatctttagatgtcaaagaatatccatcagaagggttttatcggaaaaactgaaatttatattcatgagaaagatgaaagttggttcggaatctttgatcgcttgtgttaaccaacgaggacattttgcttggtactcccatgccttcataattcaattttatttaacgttttactatttaattaaatgttgt

SEQ ID NO: 396 - DNA, 4145 bp, Glycine max
catatacacaaaattatctttaaattaatataaaaatattaataacatatatttcataaaatatcaaaatttatatccctgaaaaaaattgtagtgatgttttcttttagagaaaaaatgattatgaacactgcactatcatatcataatccactgttaacttttaaaattatcttaaaataattttgtttataaatgacaatataaaattatttaactatattaaactctttatatatatatatatatatatatatatatatatatatatatatatatatatatatatatatatatattagtttatatgtcaaaacaaaatttcatctaaattttaaaattcttatataatggtttaaaaacttagtatattaatataatatagaataaaacattttagttaatatccataaaatacccattacacttactaataaatacgtacaccaagaataataatagaaaacattgttactcttcaatagattaatttatttattttttttcttgttaaccaacaagtatcaccattcactttaaagaatacgaagacgaagaaaactgcgctggcaaattcaaagacgcccacaaagcggaaaaagatccacagaaatcacgattcactcgtctctacttattctacgtaccaaaaccacagcaccccctgttttacaaaatcccccattatttatttcacctgcagcctggaacttttgtcatcccatgccacgtagcttttcttcaatgaccatagtacccttccttacgccgctagcactacccctaaaaactgcaatattttcttaactgaaagcatccaactatctaaacacacattttcgcaggtatcgggccaaatttccacataaattcgcataaacttcaaccatccaacaactaatttggtaaatattactacataacttaaatacccaacatggcatttccgtaaattatcaacaaaccaagggctaatcactagtcacaccctttacaaatatctccaacctctccacagttccactcaaacaacactagtcaagtacaatagacacgtaatcaaaaccatgcagatacgaacctgccactccatcaccacccaaacccttccacaacttccgtgttcttctagaaaagcccaccaccgccaccttcttccgccgttaaacgctgcggtttccgcgcgccgttcaaagcccggaaggcccactcaatgcctccagaaaagaaagaaattttcaagtccttggagggatgggcctcggagtgggtcctaccgctgctgaagcccgtggagcaatgctggcagccacaaaacttcctccctgacccctcccttccgcatgaagagttcagccatcaggtgaaggagcttcgcgaacgcactaaagagttacctgatgagtactttgtggtgctggtgggtgatatggtcaccgaggacgcgcttcccacttaccagaccatgatcaacaaccttgatggagtgaaagatgacagcggcacgagcccgagcccgtgggccgtgtggacccgggcctggaccgccgaggaaaacagacacggggatctgctcagaacttatttgtatctctctgggagggttgacatggctaaggtcgaaaagaccgtacattacctcatttcagctggcatggtaagtgtttcactgttttttattttttatttataatttgaattcggttgactagattctattgattgggtgagtatgcatttcttttttacttgacatatggcaggagtaatttcttttgtatatacgtgtttaaaattggatattgttcgtctagcgatttttgcttctcttcattttaatttctgaaggtttcgagatgtaccattccacatgaagcaaaaattaattgaaatttataatttaaaagaggtgatattctatgtactattaaattgaacaaaattgttattcataacaatatataaaagaaaatatttccttttttgatctctacatttgtcgattattttgtcttttaattgtttttaaaactactcactactatattctcttccattttttatttaacatctactctctattcttctttcatttttttttgttttataaaaagtacagagactcttcaattttctatttaacgtttactctttatttctctttctttttatattttaacaagaaaaatagagttctgtatctctctttaatttatatataagctctgtagcatgccggtccacatcacatataatagtttaaaattaaaattaattaatgtacttaacagctgcatagctcatattggtatattaaattgtacaagaaaaactgaaaagccaaacaaacatttttagtatcaataaattcttggtttcacgtgacatggcaatcggagctttctcatagcaagttgggcagacttaaattgaacagttaagtagattttttctttttaaaatgaaattgaaatattgtattttgttttgattaaattgggtaggaccctgggacagacaacaacccatatttggggtttgtgtacacgtcattccaagagcgagcaacatttgtggcgcacgggaacacggctcggctcgcgaaggagggcggggatccagtgctggcgcgcctatgcgggaccatcgcagcggacgagaagcggcacgagaacgcgtactcaagaatcgtggagaagcttctggaagtggaccccaccggggcaatggtggccatagggaacatgatggagaagaagatcacgatgccggcgcaccttatgtacgatggggatgaccccaggctattcgagcactactccgctgtggcgcagcgcataggcgtgtacaccgccaacgactacgcagacatcttggagtttctcgttgaacggtggagattggagaagcttgaaggattgatggctgaggggaagcgggcgcaggatttcgtgtgtgggttggcgccgaggattaggaggttgcaagagcgcgctgatgagcgagcgcgtaagatgaagaagcatcatggcgttaagttcagttggattttcaataaagaattgcttttgtgaaatttcagttaagacttaagagataagagatagaggtcaacgtgagtcaacaggtttttggctttgtgactattttgagtttttgtttgtaggtggcattttgagtacgaataatgaacaatttaacatggattgcgtgtaatggacattgttggatccatggttgttgttctggtggatacaaaaccagtaggacttttttgttgtaacgtttggcttgcatattagcttagcttgttagtgtttctctttatttaaaatatcatattttgtaataaaatctctgtattaggtaatgatatgatatactaatagcatgttttggttttgacaattgagagaatatgtctttccttttgaaagctacttcatctaaagcatagcattaaaattgagatctcactttgtacgtggttgagatctcaattattcaatgcaacattataagtattactatctccaatcaataaatgtaatgagtcttttcgattctgttaattgcgataaaaaaaatagtgactattaattacatagattattttctatgtgagtttaatttttatatattgtgagtgtgaaaatttttatacttttaatcaataaaaaattatgataagatggactttaaataattatggcaaaatgttaataaatttatcatggatattaatttattattgggtaaccgtataaaaactagtgctttgagtcattggatattttttctataaaaaatcaaactaactcaagtaacctttcgatttattaatgatacttgcgacaatctctctgagtgttcgaacaaaagagaaaaggtacaaatgaaatgtgaataataataataaataaataaataatgaagcctacgtaatctatatggcgtttagagttgaacataaaattcaaatttagaattaaaatttgaataatcaaatcaatttttttatataaaaattattttaaaatttaaacaattttacatgataatttcatcagattagacaataacagctcaaagtatatctagtaacactttcgattttaataaaagaactaatataaaaactttga

SEQ ID NO: 397 - skipped

SEQ ID NO: 398 - DNA, 7635 bp, Glycine max
aacatgatcataacagaaacaattgtcccaacatatctccatcttaaattttttctttgtcaagtataattgtttaagtattttattgatgatacaatatgatgttcttctgtaaataagttgttaaacaaaaagtcctctcatttttaatcaaatctaatgacataaacaaattaattatatttagtaatataattatattgaaaataattatattagaaaattcagattttaaataaaaatattcatctaaaaaatatgctaagtaaattaaataataaaacaaaaataattatatttaataatatcattttctttaaaaaaattaaatttttttataaaatttaatctaataaataagtaattttaaaaccaattaaaaaaattatatattataatattttaaattaaaataaaacaaaaaagaaaaaaaaagccctaaatagtgtatattgagaattaaattgcaaagtagtataaattaagaaaaaaaagatgtatttactgaaaaaaacagtatctagatgtaatcatattttacttgattatatctccatgaatcttggagataaaatataattatatcttatcatagttagaaaatattataatatgctttggagtatgaaatttctaactgaagaatcctatttcgaaatgactaaaaatgaaagtcacctaagaaagaaaaaaatgttttaataaattttaactaaaatagaaaacgtgttaaaatgtatcactataatttttaacaaattttaactaaagtagaaaaatgtgtgagagctctagtgaagtagtaattgatgcatataatgtggtaattaccttgaagtgaatagtagaggttgaaaaaggggagttacgtgaggagaattgcagctgcaaaacatggaaatggaaaagcaaaagcaatactaaacacttataagggagggtgtgtgagggtcccaccacaatgcaacatcactcgtgcatgtcacgggctcgttggtgagccgccaccacacttccaccacaaattcatattattccctgtgcttcattcagtcccttgagattgggaagcattggtggctagctaagcgaagctaaaaccaaactcttcagcagtttgtttttgcttagcttcttcttctgcttttgctttctccaccaccacaaccaccatgtattctgccactgcctccaacactttcttccttctctcttgtttccttctcttctgtctcctctcagctccttcctgtgtttccatgttctctggtaattgtttttctctcttcttttttattgcttttttggtttttcttttttctctttcattgttgtctgtctcagaaacataaaagaaaagcaaaggtttttgagtttttgggtggcgtgcaaagacacccttttaaagattcagattccgttttcatgatgttagcacaagatctcctttttttcttctctctctcagatttcgatgcaacagcacctcaactgaacccagaaaaggcacacttaaccgaacaaaacgccatctcagcgtggtgacggttgagattctcccgtttctggcgtcaccttgaatctctccgagtcaccaaacgcaaaaaaaaaaaaaaagtttttttttttataaaatattcatgtgggtccttggattgtgattcttcctttgaccctctctcggggtgtgcctttctgggcttgtggatgagttgacacctgattcaaatgagattgtgttttgcgtgaggacagagaagaaagagagatcagaaaaaaattgtgcttttgtgtgattcttatatatctagtggtgctaatgggtcaattcatgacacttgttagttcactggagatgcttgtttgacaagatgattaataataataatttaatactctgactgggacatctgagttttttggaatgggtagggtggtggtaggagggtatatatgctactgctttatgaggaccagattttgaaattaaattagttagcaaaagggaaagaggatgatgtaagtaagtatattgtttttgatggtgacaattgttttttttttcttcttctaaattgtgtgtatggcttgattaaagttagaaataaaggggggaaagaaaacgggaagaacaagttagctttgtttgttcttgttgatggatgtgattgattgcgtgaatgtgctaagtacctatttgaaatgaaatgattaggtattgagacaggagatttagaaaaaagagatgatttgtttccacagattctaagagacgaggcagttgcaaggctttatgagcttgggaaggtaccaaatctaaactcagctttactttgtctgataattttcatttatatttctaatttatagtcaaaatagtgcatatgaatttctgttcttgacctcaatgatccagacccttacaggaaaatgctgataacttcaatgtctgccagttttaaagcataacattgaaagaatatgcaacattctgtaatctaaattgtttattttattgcatacactgtgctgattattctcattcagtggctggtggaccatgaattgtttattcttcttggaagttaatgttgctttttggatatacaggtgagtgatgctagtggttatttggagaggacattcttgagtcctgcatccatgaaggcaattgatcttattcgtaaatggatggaggatgctggtttgagaacgttagccttctaacttgttcaactctgaataatttttctgaagaattgactgatgcttttgttatttccagttgggtggaccaaatgggaaatgtacatggtcgagttgatggtgcaaatgaaaatgctgaagctttattgattggatctcacatggtgaggcatttattcctgcaatttattttaaacaaaattgatactttccttgacagtagtgataatccattttaatgatggatactaggacactgttgttgatgctgggatgtttgatggatcactaggaattgtctctgcaatatctgccgtgaaggctatgcatgtcaatggaaagctgcaaaagctaaagcgccccgttgaggttagtcaagtaactgatacaagtttgcaataaaagtactggtttgtgctcattgctcattgatttattgtatccttttgtaataatgttgtgcattgagagaaatatgtatatggaaatgttgaacctatgctactgttttattgatgacattttatctttctaatgctgcaggtgattgcatttagtgatgaagagggtgtcagatttcaaactactttcttgggaagtggtgctatagctggtattttacctggtacaacattggagatatctgataagaggtttcacctaggaactttctggttacatttatgggaaaattttgtatgatcaatatatttattcatagacctctttcagggaggtgatgattaaagattttctcaaggagaactcaatggacattacagaagaaagtcttttaaagctcaagtatgacccaaagtctgtttggggttatgttgaggtataataaaaatttgcattcttcatctagtgctgttttgctcaacaatttcaccaataagctcatgaaaatttgcttgtgtgtttattacgtgctgcaggttcacattgagcagggtcctgtgctagaacaagttggtttcccacttggtgtggttaaaggcatagctgggcagacacgattgaaggtatacaaataagttttgctaatatgatgtgttctaatgctcacagttgctcggatcagttatggttgttccctatgatggaacaacaagatataactgactattcaaatggtcttgcaaccaaacaaggctttttaatcttttcatgcatgacatatgatgtgaacttgtcaccaaaggatctgactcctttaaagtaactcactttagagggtaaagtaagttgtctcagttgtaaatgagaaaatcaatggtcgatattatatgcacatgcataacaaattacgaatgtgttggaatatcaactattgatttttttgtcaacaactaagattattactttaatccttactcatttttcaggagccaaatccgtcgtcaccaaactaccttttgttatttggtaaaattttcaacatcaatgtttgtaaaagacatttgtaataaaatagatctatctacacactgttcttggttggttttctagtatttcttgctatatgtatatgtgctctttgcatgtgtatgtgttggtttgcaattcacacataaacaaccatgcaggttacagttagaggttcacaaggtcatgctggaactgttccaatgtccatgcgccaggatcctatggctgctgctgcggaacaaattgtagtcttggaaagcctctgtaaacaccctgaagaatatctttcttatgatggtcattgcagtgattcaacagtgaaatcactgtcaagctcacttgtttgtactgttggggagatatcaacatggccaagtgccagtaatgtcattccaggccaggcaagcaatgaatttctaaaatgctactgaccctgcaatctcaaagtggccatgcttcatcatttcttatttttgatagtttatgcccatgatgacagtgtgtgccttgacttgttgtaggttacatataccgtggatatacgagcgatagatgaccttggacgtgaagctgttatctatgatttatcgaaacaaatttaccaaatatgtgacaagcgttcagtttcctgcattattgagcacaaggtattatggttggccttcttttagttttttcagttgttttctgaattgtacttacaatcaatgactttgttctgttcacctcagcatgatgcaggtgctgtgatttgtgattcggatctaagttcacagctcaagtcagcagcttattctgcactcaagaagatggagggtgacattcaggatgaagtgccaacattaatgagcggagcagggcatgatgcaatggcaatatctcacttaacaaaggtaacatatctttgttttctgtttgtagtttttgagatgtaatttactctgcagaatctgacaatgaatgaggatttgaacaggtgggaatgctgtttgtgcgttgtcgcggaggcataagtcactctccacaagagcatgtgctagataatgatgtctgggcagctggtttagcaaccttgtcatttctggaaaacctatcataagtgatacggtaactgtgtaaagcaataaatagatattatagcttgtaattataggttaatttattgagttaattcatgagttaactcttttcttttagttgcttgtgtcttatagttttgtaattgaatttttggttttagttatcctgttatcaggaaacggctccaagttgttatgcatgttctttgccagtgtcagattaaaacttatgactgattttatttttgaatttaataggtatatactatttagtgtaaatgtcatcaagtcattttaggacagtagaaatcaatcttggtatgacttgtaaggtagttagtataaaagtaaataaacttgttatgcataacggtttatgattaaattacaatttaaaatatgatgcatgcatgcagtatttattcccacacaaatgcttagctctctgtattggaagttgaaaaaagttacctaatacatgttgctttacgaattcaaatttgtttgtcaaatcattaagaaaatctctttttggacaatgttttcttaattgttaattcatttttgtgattgattctttaattggaatgacatgaaaagtgacaagaagaaaggacaccatattggattccatactttcacgaacattgagtattttatagggagagtattggtacgtagagttgcaatgcatgggacgcgtaaacttaataataattagaaaatgattgttcttcccactttgactctggaatcctagctctaaaacttaataaaaaattcttgccgaataattttatttggtacaaaaataatttccaccattgtattatgtccaatcaggtgttagatgattcaacataaagaaagaaaggaatatgacttgatattggtggtcaaagtatcaaatgcaaccgtcaaaataaagaagggaacatgaatgcaatcatattcggattcacatagccaaagcctaaaagtaattcgtataaactttggatatcctctcatgttgtttaggagcatgatacaattatgttcaagagagaaagaaatctttattaaataagaacgcactatggttgattgtaagactcattaactatttgtcatcatgttagttcaaatccattcgactttcaacattattgattgttgccatggagagatattgttaacttgcaaactggaataggtgagtgaggctgaggtagaagattgcattcatggactgcacaagtgtacgagaaccgaagcctattttgtctggtcaattcgatttgagaggtggattaaatagatgcatgaaagacgaaggagttggttgagtggaggaagacaaaatctctatctaattagtcgtaggtttgaacttacactcttctctttgaagtaaaatatatgttagttcttaaaatatacactttttttgagtttgaaggttttttctgtcttaaataaaaagatgattgcatgagtgaagtaagatagaatctacatcttgtaggttcgaaccgacacttgtttctttgaagtaagataaatgttaattcttcttaaaatgctttttgggtttgaaggattttccatcttaaacaaagagatgattgaatgaaatgattcatggcaagcatggagcatggcacattggtcttgtcaatgcttttatcaaccttattaaatttaagaaattcaataacaatatattggttataatatatatatatatatattaacagtatgttaataacaatccttttacactcaatgatagtcaaagttaacaatatatgtcatctcatatacctttagtttctgcagcacaagaactttttgatttggagatgctatatgacttgacatcatcgggtgaaaagagaagcgtgggtaaattaagaaaaaaaatctgcttataatgtccaagaaaaggataactgtaatcacaacataataaagaaaaagaataccacttcaattgtttataggattcatatcctaattcataaaggattcatttcctgatgcaaataaaagtcactcatttaattcaaaattcaattaaagagattgataatttaattgaagaatttaagttcttttcattcaagggattaaagtttgaatatttttatgatttgataataataattgaattttgaattaaatgagtgacctttgtttatacaatgagatgatttaatgaaatcaatctcaaagaaacaataaattgttgcactttccacgactgaagcatgatatatattgcagcaactaattgtgtcacataaaattgagaagaattttagaagtgatataagtagaataatcccacaaaaatattttgtgacaacaagccagtcattgcattgagtaaaaattcaatttttcatgggtgattcaagcataatgatattcaatt

SEQ ID NO: 399 - skipped

SEQ ID NO: 400 - DNA, 4560 bp, Glycine max; identical to SEQ ID NO: 333

SEQ ID NO: 401 - DNA, 5902 bp, Glycine max
acatataaggctgcattcatcaataaaaaataaaataaaaaatttcgtcactaagaatcccaatgttcatataataatatggaatgtcatattctttacactcttataaacttcaaaacaagggaaatgactatatattaatttataatctcaattaatctgtatataatcaaattttgtaatatctaaaaggtaattaataaaactcgcccataaattagtaattaagatacatgatataatctggatcatatagtagtacatctgagttctgacttgggaccatctgcaaaagagtgcgtgtaagtttgtgtttttcctctcattttttattattggttaaattagtcgttttgtcgttatagttttagggttcttatttttttttgtttttttattggtcttttttttataatttatattttaattttttttagttcttctagtttaaaaatattttttttaatccctgtaatttatattttaattctcttttaatcgtaatttaaaaattataaaaataaagtaaaaattatgaaattataaagactaaaaaaattattttcatgattataagaattaaaaaaaattaaaatataaattataaagattaaaaataccatttttaaattataaagattaaaaaaataagaatcataagactacaggtaattgaataatactaataatagttaagctccactctcatatcccataggcataactgattatatacagtaattatcattatagttaattgaataatactaataatagttattagtattaatttgttaatgatacgctcacaactctgggtgaaagacgtagtacgtcacaaacacacaaactcaccactcaaaccacaagcttcacctaacccctattcgaactaccatcataatcccctctataaaacccccatcacaattctcaattcaaccaacccaaccaaactgaaccaaatcatcacacacacatactaagaagcaacaattcttctacaatggatctcctccttctggaaaagaccctcataggtctcttcctcgctgcggtggtcgccatcgccgtctccaccctccgcggccggaaattcaagctcccaccgggcccactccccgtcccaatcttcggcaactggctccaagtcggcgacgacctcaaccaccgcaacctcaccgatttggccaaaaaattcggtgacatcttcctcctccgcatggggcagcgcaacctcgtcgtggtttcttcccctgagctcgccaaagaggttctccacacgcagggcgtggagttcggctcccgcacccgcaacgtcgtcttcgacatcttcaccggaaagggccaagacatggtcttcaccgtctacggcgagcactggcgcaaaatgcgccgcatcatgaccgtccccttcttcaccaacaaggtatatagtgcaacaatttttttttctttatcagtaaacaaggttttcaatatcggttacgatcgcgttggttaaaatcatgatagattacagactaatgtggtccttctgttataacacacagttaaaaaaaacctggatgttgcagctaaatcaaggctgggaccatttttaaaaaatttattcagatattaattaatttttagtttttgttagcatggaatcgaacccagtcaacttttttttttaaaaaaatcattcaatcaaccttatatttttaggttgtgcaacaataccgccatggatgggaatcggaggctgccgccgtcgtcgaggacgtcaagaaaaaccccgacgccgccgtctccggcaccgtcatccgccgccgccttcagctcatgatgtacaacaacatgtaccgcataatgttcgaccggaggttcgagagcgaggaggatcccatcttccagaggctaagagccttgaacggagagaggagtcgcttggcgcagagctttgagtataactatggtgattttattcccatcttgagacccttcttgaagggttacttgaagatttgcaaggaggtgaaggagacgaggttgaagcttttcaaggattacttcgttgacgagaggaagtaagttttttctgtttcatttcctttccttcattcattacctcgcatgtaaacacccatatctggtgaatttaaagtggtggtgcattgtaaaaatttcactgatgttttaaaactacaaatacttaatgataaacaacaatgttagaaacacaaacgaagtgtacggaaaaaatgttaggagtatgaaaaatatttttaactgtgacgtcgtttccttttgttttggttttaaatcacttgtgtgattcctaaaatacctttttcattttggtactacactactacctttgattgagtcaactagtttttttttttttttttaaggagtaggagattaataatctttaaatgggtctaaaaaaagtttagcttcaactagggtggaaagtaaattttatttagtattaagattttttttttgcaactgtagcatattttttattttttttatatacgtcattgatgacttgatcctaaattaaatagccaattttaggagtaaattaaatagtcagtttctttgcaagttggaactttgggttattttatttatttctaatcaattcaattaaatggacattataacaggaagcttggaagcaccaagagcaccaacaacaataatgaacttaaatgcgctattgaccacattttggatgcccagagaaaaggcgagatcaacgaagacaacgtcctctacattgttgaaaacatcaacgttgctggtaagatgctttgcctaatatttttatcccccacgacaagaaatgtcctttatatattgttaaaattaaaatacaaacaaacaaaaataacaattatggtgcaggacaagtcaagtagagttactaaaattaattaaatttataaaatattttaatttaaatcatacatcttttttttcatttcatatatatatatatatatatatatatatatatatattaactttagaacaattaagcaaagtcggggcgtacgtcactttaaatgtagttatcttttcagcgtcgttaactgatgagaaatttatttgcttatataagaagttatggtgctgcaccgcaattgcatcaaccattttatagaaatgaagttttttaaaaaacaattgactgattcttttttccgaaatttaggttatttataaaagtacatataatttttctggtacaaggattgattgctgcctttataacctacataaaaattgcgccagtgatatttttactaacttttttttttttactaccaaacataacggtatttaatgagcacacaaatatttcatggtcattttcccgtttttttagagggggcgaacgggacacgtagttatggattcattgaatgaatgaataagggggttaggtggatggattgaactggtggctttcccatgccccatgttggggatcattcttatctctttctcaacttgtttgttctgacgtgtgaccttaattaatttaaacggatacttgttcttatctttcttatttttacgtagaaaaatatttattgtacaaccttgagttctctataatttgagagagaaaagaaaaaaaaagagataattgattaatttgattgatgatataatatgaaatgaagagagatatagaaaaaaaaaagaattgttgatgtaatgtttaaattttttttattgtcaacataccattactcttttatctatattgtgattgtggataactttttaattttgtttttgttgtgtttcactgttttctagtcccaaatatgagtcgaggttatcatactctgtcgtactggtggtagtagtaggtaatgatagtgaccaaacttttaggtggacccacctccgccaaaagtcgcatgtggtttacttgattattttggtttagattagaaagtaagagaagaaaaagatgcggggcttttaagttttcaaatagggtaggtacttgttaggagaaggggaaaacaaaaggcatggtatgattaagatggtatcatggaaatccaaaccttagtttagtttattgaaaaactacatatattatagagtttaacaaaaaaattattattgatataaataattattaaagataacctgattaatcatataaaacaatccgtgattaaatgattatataaaacatcatggataaattgtttattgtatattactatcatatatgatagttttttctgatgtggcaattatgtattattggaacagcaattgaaacaactctatggtcgattgagtggggcattgctgagcttgtgaaccacccagagatccagcaaaagttaagggatgagattgacagagttcttggagcagggcaccaagtgactgagccagacatccaaaagctcccatacctccaagcagtggtcaaggaaactcttcgtcttagaatggcaatccctctccttgtaccacacatgaacctccacgacgcaaagcttgggggctatgatatcccagctgagagcaagatcttggtgaatgcatggtggctggccaacaaccctgcacactggaagaagccagaggagttccggcctgagaggttcttcgaggaggagtcgcttgttgaagccaatggcaatgactttaggtaccttccctttggtgttggcagaagaagctgccctggaatcattcttgcattgccaattcttggcatcactttgggacgtttggtccaaaactttgagctcttgcctccccctggccagtcacagattgacactagtgagaaaggagggcaatttagcttgcacatactcaagcattccaccattgtggcaaagccaaggtcattttagactccaccacatgatcatgatcatatgatcaatccccttaattttttcttttttcttttcccttttctttactctgtattgtatcaatgcttgaaaatggggttgttccaaaaatgtcatatatatttggcctgctaatgggtattgtaaatctctgaacttgaagtgatgcacggttttgagatggttttctaataaacctacacttttgtctctaaatactctgtttcatatagtagaactttattgttgtagcagagccagtatttgtgtattactagcatgtctacttttagattgggctttgtgcattcatctctcttgaaaaattgcaactgcttgatgaactgaaaaaaaaaacgtaaaaaaagattttcaaataaaaatcttatttgaagtataaattattttaactagtaaatatattaaataatgtattttcattaactttttttatttctttaatactattaagtcattaattaaaaagacattcaaaattaattattaaataaagtagtttcttttaaagaaattacaatataacagtctataataatacattcattttggggttttaattcttttacatcacttttttaaaacttctttgcctccccctctctttattacattattacttatcatgcatatctcattactaaaaatacaatatccacgtataactacctccccctcttttcattattctcttcttctcgcgagtgtctatatcgtgttagatgtgaaatgatttgtgccatctcaagtcaaataagcgaaagtacaaaacagaagaacaataattaaaaaataaaaatctcttacaatattttgaatcaataatgattgtaaagtttactgtaataatttatgcagcttttcatatatagtttttagtagaaaataacggtattaaacaaaaagacataagaagtgaagagaaaaagacataagataagatgataagaagcatattggagcataataaatttaaagaaaaa

SEQ ID NO: 402 - DNA, 5564 bp, Glycine max; identical to SEQ ID NO: 282

SEQ ID NO: 403 - DNA, 10531 bp, Glycine max
atccttcagaagttataaatacaatgaactgcacctaatatacaattaaagtgtagtagcttagtggcaatgtgagtcctttcatgcttgtagggaaagggttcaaaaccagtccaaaatgttttcgcgttccttttccttaaaaaggaaaacaaggaaagaaaagcttccactgagattcgaacccagaacaaagaggtcatatacattgcatctaccactgaaccaacttgtactttgtttaatattcttaatttaaaatgtacattaacaattccaagacagtaaacaaaactcgcaagacttcatcttcaacctctagcgggggtaaaaaaagaagttattattaccttgatttcgaaaaatccacatcattatatgcattttagacacccaaaaatacattttaaatcatagaaaaattagaaaatttatatcattcctaattttaatgttattttgaattaaggaggcttaaaacataacacctatatattcaaaaaataaactcggtataataggaacgacccaatatatttgggtgattgcaaatatatttgcaaaaatatgagttaaatatgaatggaaaatgaaccagattcataagtaacaaatttttctaaaataataaaatattaagacacgtgcagcgtgcagacaacgtgcgcttccagcatcttcctcccaagtcccaagagtgtgacaggcgttcaatttaattggtccaacttgcacatttgattaaattactcgaatcacccatgtgggtatttccatctgctttattcctataaatagtatcatgactccttctctcactcggcgagtgaagtagacacttgaaataatgccaagtatactaaatgtcttagtcttaagaggggggaaaaactggaattccaatgattcttaatttcttacaatccaatctgcaaactgagtgagatatataacttgtttttgatttcttcctcatcattttgcatatacaaagattaaaatggaagggttttttggaaattgcttcaatatgattttgctgatgttgtgcttcaccaacttgagcatagcttttgctcaaagtcatatgaatggatttggagagcagccactggccaagattgccattcacaagaccgttttggcgctacacagttctgcttccattatagcagtcccttttgtgctaggaactaaggtacgtcttctcaacgtgttgcattagctaagtcctttcatctcaattgttcaataaacaattgagtgtatgtaggctggaagtgaatggaaattttattggatgttgttttcgtttctcaaaaaaaaaattatgtttggactcaagtatatctaatggaagttgaaaattttgcacactttacacggatctcaaatctattcgaaatgagtaatgatacttcaacattcatttattttaaatatgttattaacacttcatttattcatgtctcttttttcctatcatatcataaactttatagtagatttgttttttcgtgtttgaactttcctacttcaatgagaaggcttttaacatttattattaaatgatattattttcaaaagttattgaaaggaaaatattttgataaaataattttttatcatttaatcttatgtcttatcctaaatttatatattgaatatttaatttaacttttttttatttcttttaaatataattttaattttaactttaaatttaatttactactaaggatgaaaataggtcagatgacttgttaggagttacaacctgacttgtttattaaaaagactagatttagactttttaaaaaaaaaatttaattaaaaaagataaaatcaagattttaggctttaaaaaagtcggctaaacttgatagattgacctattgatattatatataattattaatattaacattaataataagtttgagagatctctttgtctattttgactcgttggcctaacgcatatatagatttattagcttgtctatgaatcttctatgaattcggtcatgtaaatacctaggctttcatgttagattggacttttaaatagaccaagttaaggcctaaaaagtaacatgctacaaggaaataggtcaaacttaggtttgaacggttttcactcctatttcctactgcttgaataaactaatatgaaattatttaaacttaatcatgtcttaagttcaaattttgattatacaattaccttaaatactcgaagtaaaggttttatcactcataataattttatcctacttaaacataattatattcattaagggatacatgtggtttataaaaaaattcaaatttaatttgatttactaactaactcggacaaaagaaaatctcaaattattctccttttatcattatttgtatctttctttatgtatgatattcatctttattactacttgaatgtcaataatatgtttaaggaatttgtcaacaagtaaaattaatattgtatcacagtataaattatgtattgtagattttttataaaaaaaaatatgtgcttaaaaatattaatttattatgaattttacttataatattatttatatattaataatatatgttcataacttatatattcaaaaacaagcacgagtattattgtgcaaaattaatacgtagcactttttgtttcaaatttcagaaaaataaaattgacctgatttggaaaatatcattttcttttttatgtgtatgaatttgagttcattctattttagtttagtttaattattaaaattaatattacgtataggctttagcctcagtaattgatttatggaatttacatttgtggacatggttggttatgtatgtatgttgcagggtgaggatacccaatgggtgactgtagagctagagtccccaataccatctgttgatgactgggtcggagttttttctccagcaaacttcaagtaatgtaccatcttatatgtgaaaaatgttagcaacatattgagtttgtagtggatgacttgaatttaattcatatgtgatttacaactaaagattaatctcatatctgatctaaaatatcgaagtttgtagaaatatttagagtcccactaaaaatctaaaaatcctaattataatgattattcaaaataattgtacaataaaagagagtctataaacgaaaagtacatttgctagcatttatagttatataaagttaactaaaatacattgtaaaaagtggacattcatcccaacaataaaaatgttcatggtgttgagtaaaacttttgtcatgggaataagctaggaacatatcgctattattgttgaaacaaactaaaggaagtctttttcttacatcacagttcagcaacatgtcctgacactgacggcattggctgggtagaggaaccatacatatgcacagccccaataaaggtaaaatgcaatgcaaccctacggggttaacttgtagatatgatcatattaatcaacaattttgcaacagggaatttctcacgttaattttatttgaatctttgtactgtactcctgttatgtgtattctttttagcaaatgaggcaaaacttatgctttgtttgtttcttaataaaacttcttttgcttagcaaaaaaacttatttgaatctttgtatcagtacaagtatgccaactactctaaccgaaactatgcaaagaccgggaaagctattttgaagttccagttgatcaatcaacgtgcagatttctcatttgcactattttcaggtggattatccgatgtaagttgtattttctaatcctatgtttgatatctccaacttctttttatttttattttatctaaactactaaagcatgccaatgttacgttcttttgctttataatttcatgaaaaatagtataatacatgaaaaggggttgttctcattcagaacaataattcaatctatgcttactagtattcatctggttgaacattgcagcctagacttgtggcaatttcgaattccatatcatttgcaaatcctaaagcacctgtgtatccgcgccttgctctaggaaaatcttgggatgaagtaagtttatcaatatttgctagagaaccttggttttatgtttctccaattagttgtattcaccacaagtctatattatcgtaattttcagaccacttagaaagtaatttaaattaacaagcaactcataatacaaggcacaaacaaatatgggaaagactactttttgatttgctgaaattaaataattgtaattgatgctaaggttttaacttttgctaacctttctgaaattgttgttatgggaattgactattattttacgtaaaggcagtagataattaagatacaaaattgttgttatgggaattgactattattgtagttcgcctccacctagaatatgttagatcttcctactaattactaagagtaaaggcagtagataattaagatacaaaattgacatatgacttggactactttttagatgacgcgtagttgtttatgggatatttgaccttacaattaagaatggattcatacttaattgggggttgtcctctattagtatgaggtggaagagtgtaagggcttgctataggatcaaaatttggggtagaagagatattattctgaaaaagagtaagagtttcaagtgatacctctacaaaattatttttgaattggatcaacagtgaatttgaggttgaaggagagattatactatcaccttcaaccatattctcatttacattattctaaatttgattctccatgttctcatccccattatcttgaattccatcctcttttgttgttggcataacatcaaataacctgatattttggtcaagtctatcataattctgcacctccaaatcacaccctctttgaggtgaagaatgaagtgttttcaagggaaaaaacatttcatgctcatgaaatgtaacatccattgatacaaaaaatctttttgtagatggatgataggccttatatcccttttgagtggtgttgtatcccaaaaaacacatttcattgctctagattttaactttgttcgctagtgaggatgcaaatgcacatatataacacaaccaaaaatatggggtggtaaatgattgacaaaattaaggatgaaatgatgagaaatgacatcaataggtctcttaaagtttaacacacttaagggaactctattaataagataaactgcaaagtttaaagcttcaccccataagtaagaagaaatattactaccaattaataatgatctagtaacctccaaaagatgtctattttttctctcggctactccattttgatgaggggaattaggacatgatgtttaatgaagaataccaataaatttcataaaatttgtcaactcatttttgtagtgttcgcctccattatcagacctgactatctttattggaatattaaattgtgtgcttatcattttgtgaaaaacttgaaaaacattacacatatcactttcgcatttaagaaggtataactaagtcattcttgtacggccatccacaaatgtcacaaaccatcgcattccattatgtgtaggaagaggggcaaatccctaaacatcagagtgaataatagaaaaaggagcattagctctattgttatttataggaaaagtagcgagatgattttttgtcattacacaagtttcacatttaaaatcaaagatatgacaatggttaaacaatgaagaaaatatctcttttattcttagcttgtgtttcatcacttatagagtgagccattgtttttcctttggtatattgagaattaccttccatatagtagaatccttcatttcttttatcacgactaatcttttcctttgtatattttatagagtacaatatgtgggaaagaacaagaaagcacagttatgggactttgttaattgactaacagagagaagattgcaattgagagaaggaacaaaaagcacattagaaataaataacaatggggaaatgaatattgtatcactacccataactggggaagaaacaccattagcatttatgatgactgaaatagaactattagagaaaaactgtgtaaacatatttctatcacaagtcatatggtttgttgcacctgtatcaattatccaatcactacccttagtaacaacagaaaaaccacaaattgttgaaatatacctgacttagcaacaaatccagtagcagcggtggagttttccttgggagactccaccttttttccttttgggtgtcattcaggataatttgtatcatcaagacgctcagatgtaaggattgaagacagatcctacatatgtggagtagaatttgatctatttgacctattctccattttcgtattcaaaagctagtctccaattcctaaagaagagaggtaattggagttggctctgataccatgttaagaaaatggtatttggtgattttgattaatatgagacagtgaataaatacatgatcttctctaccatctctccatgattattgaagacaaaatatcaaaacaaaattacaaataaaaaaggagaaaatatacagatatttgaatcaattacaattcaaatcatagttaatccttacaattaatggattcttacatttttatctaatgcagatgacagttacatggacaagtggatatgacataaatgaagctgtgccttttgttgagtggggaccaaagggaggaaagaaaacacgatctcatgctggaacattgacatttaaccgaaacagcatgtgtggtatgaaatattttcgtgtccttataattgaactagatttgcttgtttattacaaagtctaaattcttatagtaaactcaactatgtcatggaaaaatgtttgattcaaaggcacactaccactaccagaaggataatgataacaaaagtcctattccactaagtgagatcaattgcatgaattaaacaatacaattagactcagtcaaaaaccaaattttcaagaatattattcaccatgagattcctctaaataatttcctccaatgtctttcttgacctcttgtccctattttcaaagggctgaaaactatgtaatttagtttcctataaccttcttcgcacatatacaaattaccttaatcgattttctgttaaaaaaaaatctaaattggtgtcacaacaatctgttctcaaatacaatcattttgtatcatatcttgtgtaaccacacatttatcttaagattctcattaatgctacacctatttttttcctattgtccctttaaagcccaactatacagtatagttaggaagcacagtaactcacttcaacatatttgctatttatttgctttattgaaaatgaatatcaatgcatcagagattgataatgagcaattgatttagatgtgcagcgtaatgaggatattttgttattgtacaggtgaacctgcacgaactgttggttggcgtgaccctggttttatacacacaagtttcttaaaagaactgtggccaaattttaggtatgcaagaaactatacttttatgtttatgaaaccgtgatgatttgctgtatttttttctgaatgattttgttttgctcttcttaggtacacttacaagttggggcatatgctgtctaacggttcttatgtatggagtaagaagtattcattcaaggcatccccatatcctggacagaactctttgcaacgtgttatcatatttggtgacatgggaaaggtagtattcaaaaagaaaatgtatatagtattcccaaagaaaatatcgaatgaaagcacaaattttaagcatggctaataaaatggggaatatttaatttattttttgtttgcatgtcctttaggctgagcgtgatggttcaaatgaatatgctgattatcaaccgggttctctaaacaccacagaccaactcgtcaaggatttagaaaattatgacattgttttccacataggagacatgccttatgcaaatggatacatctcacaatgggaccaattcacagctcaagtgcaagaaatttcgtcaacagtaccatacatgattgcaaggttctttttgttgcaatcattttatgtcattgacatttaattcgagttttacatcttattagactgaaaatatccggttcattcatactgcagtggaaatcatgaacgtgactggccaaacacaggatcattctatgatactccagattcaggtggagaatgtggagtccctgcagaaaccatgtattattttcctgctgagaatagagccaaattctggtatgttacatcaatctaaatgcaaactatgatatgtttgacattagtaaatcagattttcttctataatttaaacttgtcatcccactttgtccaagattgtgaattttaccttcactaattgttaccaattcagtcttttataacttcatcttatctagaaaaggcactgcttcatccatatagttcataattattaggaaatcccatattgtctgtctcaattcttggaatgcaacttacatatttattggataatttcacttatagtcaattggttttaaattgaaatctaacagtaacgcaatttttagctttggcaactaaaaaaaaaaaacttttctacttttcgatggtaataattagtgcgtaaactacaataaacgatcaacattgcaaatatgcaggtataaagcagattatggcctgtttcgtttctgcatagcagatagtgaacatgactggagagaaggatcagaacaatacaaattcattgagcattgtcttgcaacagtagatagaaagcatcaaccatggctaatcttttcagctcatcgtccccttggctactcctctaatctttggtatggcatggagggttcatttgaagagcccatgggaagggaaagtttgcagaagctttggcaaaagtacaaagtagacattggattttatggtcatgtccataactatgaaagagtatgccccatttatcaggtatgcatatatgatagctagataccaagggggatctagctctgtgagttattgtaaattctttgttatctatcttcgattcttacgaataaaaaaatacaatgtctagctatatatactgcttctcatttcaattcaacattgtttttttaatcatcctaatgcatgtggtacagaatcaatgtgtgaatgaagaaaagcatcactactctggcactgtgaatggaacaattcatgtggttgttggtggagggggaagtcacctgtcagacttcacaccatcaccccctatttggagtctttatagggacgttgactatgggtttggcaaattgactgctttcaatcattcatatctcttgtttgagtacaagaaaagtagtgatggagaggtctacgactcctttaccatttcaagagactacagagatgttttggcctgtgtgcacgatggttgtgagaaaactactctagcaacatgagttatgttgtgtctatgtgtagacccgatatggacttgaaataaaataaattattgtccaaataaataatggttaatttacttacatccgctactccatatgaataatactgtaaaaacttcaaattaaaccgtcacattgccatagtgtgatgatcataacctacctgcattatttttttaacattgattatatatataattgatgtaaaaaataaatgttatattttgcataaatttatatgaataactaatttaaaaagtcattattatagattcacaacttatgtctaaccaaaaaatgacattttaattttataagaacaagtactgaattttacagacaagaattctaaatattttcatattaataatttgcagcaaggaaccactctcagatccatcactgttatttttttaaacctgaaaacatatgaagcactcattgacagcgagaactgcagagactattacgctgggatgagtaaaaaacataagttaggattgaagcatattggcttttttattacgaagtttttattgtcatggaaaaatgtttgatttgaaagcacaactttgttcataatttcaaaaactaaaaacagttttagaaaatagaaatcaaacacacaccactcactttaatagaactgctcaaatcaatgcacgagacattgatagtaggctattaatttagatgtgtagcataataaagaaattttgttatatattccgaaggtgaacctgcaagaactgttggcaggcgtgaccctagttttatacacacaagtttcctcaaagaactttggcaaaatttgaggtattcattgttggtaaatctttgtgttttaatttaaaatttataaatatatattaatttcattttacaaaataaaatatttattttagatcttcttaagattttgttttaatgagtcaactagtttattagatttgttttgacaactataggttagtttccaacggtcatatttccaacg

SEQ ID NO: 404 - DNA, 9139 bp, Glycine max; identical to SEQ ID NO: 367

SEQ ID NO: 405 - DNA, 5921 bp, Glycine max
tatatatatatattgattaaattataactagaaaaatatataaaacatgtatgcgataattttcacgtttcagaacttaaaaataaattctgtttttcatttaaatttttatattttttcaacttgaagaaatgttttccttttttattttataacaaaaattttaaatacatcattatttaaaaattatttttaaatatttaaaatgaataaattattgtttttttaaaaaaaaatcttttagttgatattctaaattcaacaacccttaaaaaattccttttaataattttttatttccatctcaaaccttaattatttctatcctaaaaatgttttttattttaaattttttactgttaaatttaaattaattacttaaatgaatgaacaaaatatatttttttatcttttatcttatttttttagaagtttaaatttttttaactttaatctcttaaagtgtttttgttagattaattaatcctttagtcagtttttatcactaacaatgccaatgacaaacattcctattaagtgtcatatttttagtttcttatcaagataagaaaaataaaatagtgtggtaaattgatggaaaaataaacttgatttaacatattaccttaagatataagataataaaaaataaaattcgaggatcaaactaaaaaatatgacttgggaaaaatacaatagtttagcctaaattaagaaaagcatggatggagtaaacgaaatattgccagtgatgttacagattggcgtatgtatttgggttgtgatgttattaaggaatcttgcaatgcggagaatattcgtggagtccagcatttcgacgccaatcataaagcctctgaccattaacattcttaagataaaatcgttcacaccaagaccccattatttaataacagttgaaaccaatatattggactcggaaacgatgaagtgagcaacacaacacaaccagacccatcgttatcttatctccttctccatggcttccttacccagtaaggccttttcacttttcagaatcccttcacctttttttatgtttttccttcgcatttctcttctttcgtttttttttctcctttttttttttgtttctgttgatctgagcgagatgcgtagaaaatttctgagtatttgatctggaaccattgttgtttcttaattaatcaacgaccctttgccatttagtttctaaatggatcttgtgtcatatagattttaagtcagaaattcatgcttcagtttcatcactcatttgagtcagcattcaaatttaccataatatccataccattgtcttcatttgtagtttttctcccacttgggatgtatgcttttcatgtttgtgtgaaaattgttgttttggctgccgttttcccagctaaattgtatcttttaacttggtctaataaatctgaacttaaacaggttttactccttttgtatttctattgcttgtcattggatgcaatgcaaggcctttgtatccacttcccagcaaaggtgatgatggaaataggaagcccctacaaacttttcgcccttataacattgctcatcgcggttcaaacggagagcttcctgaggaaactcatcctgcatacttggtgagaagactcttttcactaaacttaaatttttcggatatggaaattgactataattgttttttcatcaaatgcaatcatgctacaattatgcacaaactattattaggcaagatgtagatgacataatgaatatcattgccatctttggcatatgcttgctcaaaaacgaatctttcttgcagagagctattgaggagggtgcagacttcattgaaactgatatcttatcatccaaagatggtgttcttgtatgtttccatgatgttacccttgataatactactgacattgcaaatcgcacagagtttgctaatcgtaaaagaacatatgaagtccaaggggaaaacatgactggcttttttactggtagtgtagctaaacttgctatccattgttcaacttccttgcaaatttccttaatgaaattattagggtgttgatctgattgcttctgtctgtgacataaatgcataagcttgaaattcatctcaattttcattgtttttagggacaagtatttcaggtctgcttatgtttcaaattctataattttgtttaaagtcttattttccatctaaacaagtttgcttcttgttcgaataatctaatatgccaaaataagtttacttgtttgtatatttgcagttgatttcacattaaaggaattaaagtcattgagggtgaaacagaggtgtagcttcagggaccaacagtttaatggttagtcccttctttgcagtattgtgttattttctttcgtttgtttgacttgttcattcattggttctgaaatattctgttaccacagttcactacctgatagttctaaaatcattatcaatattttttttaattcatgatagattttgataagaatgacataaatactgaaaataagatggaactgaaggaggaaatctcctctacaaggaaaaattagttctcaacaaacaaaaacagagatgctggaatagaagaaatgaagaaaatgcagtaaagagaatacaaccagagctcaaacacagactatgccctccctgacctaagccaccaaatcctctccaaaattcaattgtcctctccaccattttccaccctctcctaattcactttccctttcctcccccatccttgcaatatttttttctcttgctgccaactgtgcattgttacattattcccctacacacagaagagtggaactaattttttttttcatttttagggaagctggctgctgatggcttgttttttctcttttgaaaactacatgaaactaatattgctttagcacacattaaaagtagctgttagtctacaactttatacttggaatctatttcaggaaagtttcaaatcatcacttttgaagagttcattaccatagcactggatgcacccagagttgttggaatatatccagagataaaaaatccagtatttatcaatcaacatgtgagtatttctttctagaatccaacaaatgtacatgttaggagaggggggatttgtagcaacaaagataagttgttccaaaaggcatacctgttgatatataattcatctaactgaagaatacattagaatccaccattcttattgtacatatgtatttgatggttagtgctggactgctcgtggtattgcacactcaatgaaataaattcccatctttaaattaatgctaatgagtattacaggaggtgagattatgttgttggaagtttataagggtgcaaattgcattaagaattcttctaccctgttagattgttttatgaaaaatcttacaatttcatgcttgataatttggtcttaatagtaatatgttttagccaagttcttttagaggctttgtgtcctttctgttcattaagttgatacaatcaacaggttaaatggtcccatggcaaaagatttgaggacaagtttgtggagacacttcagaaatatgggtacaagggttcctacctgtcaaaagattggttgagacaacctgtatttattcagtcatttgctccaacttcactcgtgtatatatcaaataaaacggacttgcccaaggttttcttaattgatgatgttactgttccaactcaagacactaatcaggtgtgtaatacattttatcctcgatgtccgagctgctttaggattattgaactttttggaacaacacgttttttttttcaatggaatttgttatacttgtgaagttaataatttatatcatgatggtacatcttctgatcttcagaccttaaaaagtatcacattacaaagagaaagcataagtagtcccaacagtgcagctttatactcgttttgtatggagaatagggaacacttttctttctttgtgttgtataaatggaggaatgtaaatgaagaatgtattgcattctttccaaataccttctcaattttcactctactatttttcagctttccactgtcattcttgccagcacactcaatgctggtttccttaaaaaaatgttgaaattggaaaaagccctgccctaggagattatccattcctacttgactaaaccttggcacactcaatgcatttatgtaatttctgctttttcaaaagtaatactgtctccattttatgttacacgaaattgttttcactgtctattccaaagcctaataaaagtactgtgatgacaatgtgcagtcatattgggagattacatctgatgaatacctagagtacataaagcaatatgttgtgggaattggaccttggaaggacacagtggtacctgtggtaaaaaattatatgacaaatcctactaatcttgttgccagggcacatgctcataacctgcaggtacagttcttgtttaaagcttattttgttcttacgatttcatggatttgatcatttttggaagattgagcggatttattcttgattttgttgtcttatatgttttgtgtgtatctgtttgacattgttcctctttaatctattgtattgtcttccattaatggtttgagccaaacaaatgacaatagaattgctaatattggtgcaggtgcatccatatacttaccgaaatgagttcccatttttgcatttcaacttcagtcaagatccgtatatggaatatgatttctggatcaacaagataggcgttgatggtctctttacagacttcactggtagtcttcatcgttatcaggaatggacctctaaccgtaaagatgatgatgatgacaagactgaatccaatctattacataaaattgctttgttagtctcctcttatgaatgatcttgagaattcagatggtgtataagtgtttggattaatttattgtgttcaaaagacgctaataacaatatttacaagagagcttttgagttttgacttaagtctgaaaattaagcaaaataaaaaatcactaatcacagtgaatgaccaagtgctggaactgaatgtaaagtttgtgtaactataaccaaaacgtaaaaataatgcaagtaaaggaactaaaatgataataccccacccacatggtaaagcatgaacattgtcgaattttcacgataatgcacctcccacgtgtcaatatttgaccttcctactctcctgaatcttgaaaagttttggtatggaacatttttctatttatatttatatatatataactgttaactaatatatcacatgaaaatcttaataattatattttttccaatattaaactgaaatataagcatgtgttgcagcagaaatgtctgaaaaagtttcaaccactcacaacacaatttgtcaacaagacctatgctattttgggcatgtttgtgaacctgttacgttcaagttgcacaaattccaaggtgtcattttgtgagaagtaacaatttgtcacttttgcttaaacagccggttgaggggtttcaaatgttaaaacaaacacaccctttgccattttaacatcatcaaacagattcaaacatcactcagacacttaatagtgattaagaacgatggagcttaaaaaccatagtgccatcaatttatcccttctgattcacacaatcaccaaaaacaactacattaatgctagaaatgtgattgctctgtcaatcagttgtttcaggcatctcaaacaaaagtcaaagctaataacacgttttcttttctattagagctattataagacaacatcctagattgctgtcagtacaaaaggaggtgcaacctttagcactgctgatactaataataccaacttcacaataaatttccaccactgaagcataacttt

SEQ ID NO: 406 - DNA, 5083 bp, Glycine max
attaaaatatttaataaatggtaatataaaaaagagagttgaataaaatgatataaaatcatcttatcaaatacgatacactaaaacccaaaaaaaaatataacagttttgaaaatgtgtgttttattaggaataaattactgtatgaagtatgaaataaatttgaatttaaatttatatctttgagttgataagtgtgagatatactgaaaaaaatctaaattctatgaaaaaatatgttttcaattcctataaatatagctttattttttaaaaaaaaaaatggaagattgttttttagttttaattcttatgattatttaataataacatgatatacatcagacatgttacattataagttatcttttaattattaacgttatatagttaaattatctataaaaaaagttatatagttaaaggtatgataggtcacaattaagtaaatataagaattattttaaaaagataaatttacgaagactaaaacaaataaaaagattaaagataaagattaaatgaagtcaagtttatagaaatttaatttacaacatatttacacctaaatttaaattttggatagtcagttactacggattcttgttatctctagttatcatgtaattggttgtgcaaatttccggtgttgtgcattgcatcataggcataatcttatcaattgagtctttctaattttctattttttaatagataaaaaaagattagaaactctttgccacttgtcaaagccttgccaccgtctctgttattaagttattattattattgtgctataaataagttgagaagaacaaagtgttgaacacttcaacatctcttaataaagattagaaatcgacatatggggggagcaaagagttactcttgttttgcagtaatagctgtggccttggttttgctacttctgaatgtggctgtggtttgcaatggaggcaagacaagcacattcattaggaaggttgagaaaactgaggacatgccccttcatagtgatgtatttgttgccccttctggctataatgctcctcagcaggtacctctttttcctcctataaacatcgtagaatttgggtgtgacattaccttttgtatatattatttttgtcacattactggtcaatgtaggattttcaaagcatcccttaagtttacatgactaaacatctttggatgatctgataacaagccaataataggtggtctgatagactcaacaacaactattaggataatctatgatacaattttagattttagattttagcctaattcaacccgaaaaattaatttatctagcaagagttgcattctacttgtatactttattttagctatataagtataattgagatctccaatatttcacgacattaattaatgtcttttattggtgacaaattaacatgtttttgtatttgttttgtaggttcatataacacaaggtgaccaagtgggaagggccatgatcgtgtcatgggtgactgtggacgaaccaggaaagagtctagtgcattactggagtgacgccagccagcacaagagagtggccaagggaaatcatgtcacatatagatacttcaattattcttctggttttatacatcactgcacccttagagatttagaggtaagagggcatgtaattactgcaacacctaactcttgtctattttattttaggcaaatggtgagaacactgattaaggaattttataaaggtttttattgggatgcataaaattatgttacttataatctttttttatgctcttatgatttctacaataaatacttactccttttattagggcaccgattcataaaaccctttattttatcacacattagtaaggttgttaactcaagtttttcattttggcagtttaacacaaaatattattatgaagttggaattgggcatactactaggcaattttggtttgtgactcctcctgaagttcaccctgatgcgccttatacatttggtctcattggcaagtttatattctctcaaaactacaatgtttggttgctttacacttactttttgtaaacccaatactattgacattgaggtttaagaatgccaaatttaatttttagatgattgggctttctttgcaggtgatctgggtcaaacttttgattcaaacaagacccttgttcactatgaatcaaaccctcacaaaggacaagctgtgttgtatgttggagacctctcttatgcagataatcacccaaatcatgataacgttaggtgggatacgtggggaagattcgtagaaagaagtactgcttatcaaccttggatatggactacagggaaccatgaacttgactatgctcctgaaattgtaagttgtccacttgatttgctgagattagttttttgatatacaatgaactataataaggttagaacctaagacttcatgccactagctaagtctctaccacgagtctgaccttagagagttagagcatgtttggttatcagttgaaaaaggaattttgggtgttgaatgtacttctagagagtaaactcatttaggtaacatgtttggttaccctcaaaagtgtgtttgcaagacttggtgcatgtttggtttttcatccaacttgaagggcatgaattctaagacaaaatccaatggtccaacgaaaattgaacccaaaagcaagggtggggatgcttttgcaaatttcattttgctgccaacttacatttgcactaataaaccaaacatgcacggttgcttttgcaaacttaagtttgcaaactttaatctaaacatacacttatttgttcgaattatttgtatgagtttgatattattctcaatgtaattcctcaaacttgaaattatgattcatgattcttctactaaatgcaaattttagtacataagtaaattctaaagaccaaaattgatgatacttttcaggatgaaacagaacctttcaagcctttccgccaccgttactatgtgccttacaaagcatccggaagtactgaacccttttggtattctgtcaagatagcttcggcacacatcatagttttggcttcatattcagcttatggtaatattagatgcaccattttttctcttaacattaccttataatcttaaagttttgctgaaaagattattgttcataattcaaagctgaatcgcttccttatatttttcatatatacaccttttttgcactaaacatcattttccttgttcaggcaaatatactccccaatatgaatggcttgaggcagagctaccaaaggttgatagaaccaagaccccttggttgattgttcttgtgcattctccatggtataatagttacaactatcattacatggaaggggaaaccatgagggtaatgtttgagccttggtttgtgaagtacaaggttgatgttgtgtttgctggtcacgtccatgcctatgaacgaagtgtaagtgctaaaaagtgctccatttcattaggtgtcatgaatctaacattgctggggagaatgataaaaccacaacaatgctataaattttttcatactgtcaatcaattataaatcatcttaaatataaacaatcttatcgtacttgataatttataattatatgcaccccatatcaggaacgaatctccaacactggatacaacattaccaatggtcgatgcaggcctttgaaggaccagtcagctcctgtatacataaacattggtgatggagggaacattgaaggcttggcaagcaagtaagctctataaattttttcttccttatattaatggcttgtctaatgtctcttctataacaagtttaatttgattactgatttgtgttttttctttgcactgcagcatgacaaatccacagcccgagtattctgcatacagggaagcaagttttgggcatgccattttggaaataaagaacagaacacatgctcactatagctggcaccgaaatgaagatgaatatgctgttacagctgactctatgtggtttttcaacagatactggcatcctgttgatgactccacaaccaagtgaactaataggatagttctgcagagttttcctatctaaaaatatccgttttataatgtattgttgggtgatgtacacttgttattgaagtaaattcaatgttttctttggtaaaccttgttttgttgccctcggtgtcagttttctgagtgtttgaattttttcatctaaaatctgatggatcttccttcactgaattcattcttgacatttttaatctctaaaaacatattagcaacccaaattaccccttaaaaatattaactaaaataggtaaagaactaaaatgtcttaaatttgttcttccttttcattaaaatgattcaagatattcataaaaatattagaatctctcatctgtaacaaatgattgaagatgacatagaattagaatcaatgttattttattattacatgtactaatatcattatataggttttttttcagcaaaaatattatatcgggttcggatgaatttatcgggttgaaatttatgaacccaatgtcaaaacttaattagaattggatcaatttaaataaactcaatttaacccaatgacttggccaaacttgaaatgtagttgaattgggatgattgtgttggttgatcaattgcaactggcttacattccaactattttgttttcaaaaattaaattagatgactatttcttgtaggagtagaattgggtatttattttaaaaattggacggtgtgtacatatattggaaaagaaattttcaaagttaaagcattttgaggtattaacataaaaggttattctaacgactatttcgtccatatatactactaactataatattttcgaaatctactaaatgctcagttggaataatggagatattttttgacgcggtagctgccaacaaaaagaagccattggaattggatgagccaaccagatgagtcaatcaacaagtttggtaaacaagataaaatataacaatttttttggattatataagaatagttaaaattat

SEQ ID NO: 407 - DNA, 3813 bp, Glycine max
attttaaataaaataagtaatagtattaattatactacactgtagtaattaataacataaatattgctatactttatgatacatgattaatatgtagcataaaatttttattatttttagttcataatttctaaatcaaattttcacaaatttttaattgttaaaatttaatatattttatagcgctgttccataatacattttgcgcataacatgcatatctttaatttagattttaatttaaaaatatatagttaaaaaattatttcataaaatcattgtctattaaatatataattatacacatatataatgaacaacaaagattaataattaaaaatgttatactttaattgttaataacttttcatataaaattaagaaaatatttataaaaaatatttaattcgtgcatgacactgacaagacactttagttttacatacagaataaatcaaaccaaaattattctattaaatatattattttttccatacgtgaacacatgagaatcttacactgttgtattaattctatatatgagtttaataaatcaatcaaaattgggttttcaaattcttctagttaatctatatactcagaaaacaagtattcaagaagggtcatatagcaatttcgagaatattaatccctatcttaaaaatatagaagggctataaggtaatatgaaaaatattggctaacctatgataaacagtcatatgtagttatgtacgctgggaccttgatgctccaacaggtaacaagtccatgtaataacacaccgacatggtagttaacaaaaaatgtaaaccaagagtttatcctcaagcatgattctaaacggcagcataaacacgccaaaaatcttcggctctggcccttgggccccttcaagcgacattattgttcaaccttaataaatttatattattaggtatttactactattaattgacgtacaagactgaaacgcgtagccaagttttgtgacttggaaaggataaacgaaggaagttgggccaatgaaaatggtttggcactttcctacctaaagagagagatgggtggggacgtatcgtatggccttatgaggagctacctcacctcacacaccaatagcatatgaagagagagaagaagtgaagataagcacagagagtgtcatctactcacctctactaccataaaaaaagaaaaacaaaaagccttcagagtcgactattcatcctttcttattcttaattaccgtgccttatccacccccaactatatttcagccagccgcggcgacacaacaacgccgacaccctcatttccactaccaactattctctctcgttctctgatttctgaaatccctcacccatggcttcctcttccctctctctctcactctctctcaccctttgccttgtttccactctctgctacgctcacacatcttccctaaccctacctgtgacaaaagaccattcaacacaccaatacctaacaatcctctcttatggcacccctgttgagtctgcaaaatttgtgcttgatctcggaggctcactcctctgggctgattgtgcatccagaaccaccccatcttccaccctcgcccccattttccaccgttcaattcgctgcctcacagcaaagggtcctgaaattgagacccacaggtggctctcgagtcttgcaaatcctatagatcaagatcagccatgtcaaattacagcagagaacagcatcacggggaaaagggtcaccgaaggagagcttgtggaagacctagtgattcatcgttctcacgagcttctcttcacgtgctcgcccacttttcttttgaatggtttagccactgatgctaaaggcattataggtcttgataaatctcgtatttctttctcatcacaagtttttcactcacttaaaatccagagaaaaatcactctttgcctttctcacacttctggtgttattcaatttggaaaaatgacgcataaatcccaaactgaatctgaaattttcagatatcttactttcacaccccttgtcgcaaaccaagacccgacacagacccagtcttcaatcaacgttaattccgtcaaaatcaacggcaaaaaggttgcttttgacacccccttaggtgggggcgcgcagctgagcacggtcgtgccttacaccactctccaaacctcgatctatgataacttcgaaagcgcttatttgaaagccgcttcgtctatggacatgaaaagggtcgatccagtttccccctttgggctttgcttcgaatccaatggcgttggaagctcccaagtggggcccaacgtgccgatcattgatctggtgctgcagagcgagatggtgaagtggagcatatacggaagaaactctatggtgcaggtgagcgacgatgttatgtgcttagggtttgttgatggaggtgagaatcccagaaattcaattgtgattggagggtttcaattggaggatgtgttggtgcagattgattttgatacttccatggtgggatttagtccttcccttctcacgaagcaagctagttgctctgatttccaaccatagtttcaaaccatagttttctggtgaatggtgataatagctttttgttatctataccacataatttttcttagattaagatgagtttcgaagagttttaaagggttctgcaatatccttttctttttttttctcctaccatatgtgtatataattacttaagtggcttatctatggtgatgatatttttgtttgaaatttataagatgaaaaaattttggttgagttatgacttatgagctacttgacccatttgatggaagcatatgattgactgattttgtttttgtttaatttttaattgctcggtgtgattgataagaaacgcattttcctgtggaatgttgatagtgggaaaagcatatccgttataaggggaaggtaaagatacaatacagctcatagcacacagttttcaaaagatgtggcgcacagaatatctttttattccttcaagatgttggctagtgatacataaattaattacccatagttctcttttcccccacaaaataaagcttctgcaattatttttcttcgcagctatagtcaattcaaataatcttaagaaagcaactctacaaagtacagcgagtctcataatccgtcgcatggaattttattttgtagtagtatattttaagccttcctgcgcttcataattcaaatttcaattttaaaattattttgaaatattacgtcggaatataattaagtgcatcactcttacattaataatcctgtctttggaaaaaagttaataaaaaacaaaaattaatggacgtttgcgttggtaaacgctagcaaagtttctccttttacattaaacatccccagcctctcagtcacattacacagaaaatttaacattatgaaactgggactaaaagtgggtatatttaaaaaaacaatgtaccaaagagtatagtttgaaaacaatttgcatgagttgtttttatcaagtaggatctaagaggcataataagtgatattttgtgtttgtttttttcttatagcataaggaagtcggctttgaatggatgttttttatttttggttgtcatactgaaccatgagacaccgataagcatgacttctcttgggtacacgatgaaatataaatacactgtcactgagtgtggtgcttcctcctcactcataccatgtaaattgtttccatattatactctttggttaagttgttttttaaaaaaatccatttttgtcaaagaaaaa

SEQ ID NO: 408 - DNA, 3306 bp, Glycine max; identical to SEQ ID NO: 290

SEQ ID NO: 409 - DNA, 3653 bp, Glycine max
ccgacattacacctcaccactaacaagcagttgaggacaccacaaaacctacccagaagggaacaaaatcattgaagccccagcataactactaactagactaatttaggttgcaataggattttggtgtgataggtgacggtgcatgacgttttgatagtggaggttgggtcgccgacatttgggttgatgattgtgggggatagggtagtgcaattggtttgaattatggtttggtgtttggaggtgtgggtggtggccgtttgaggcattgatgatggagtttggaagtaggtggtggtgcgttttggactggtgatggtttcgttagacaaatgttgaaggaaaagaagataggagaagggtaggtcgagagtatcgaagacgaagctggtaacaaagttggtagtaattacaactcatgtcaccacgtttttcttttagaaagaacattgaaaacgacaaatccttattttcagttttcagtcttttcttgagaatattttaactgaaaatattttcaaaatttaaaatacacacattttcaaatgtattttttgtttttattgaaaatgaaaacagaaaaagaacacaccaaacaccccctaagtattcatccaaataatatgttccatccattctattatcattgttattcttttatacaaatcaagaaaaactaataaataaattaaaaacaaaaataattttacaaaattaactttatgaatatcattaatttatttttagatttttttaattcatatcattaatattataaaaaataattaattaatattacattaaaaaactaaaataataattatttaattttttttacacaaccattattattaaaagtaagcagcatccatggttttgacaaaagttagatggtttgactacacgttaacatgtgagttgtcctcaacatatatactacacctgcacgaagggttcaaagatggcaactccaatccgtatataaaagagaggtccctccaagttcattcatacaatacttgtcataagtcacaaccatggataattccaaccttcaacgtctcttcactctcttccttttttccctaattgcaccctctttggctcaacaatccttcagacccagagccctcgttgtcccagttaaaaaagacgcttccaccctccaatatattactcaaatcaaacaaagaacaccactcgtcccagaaaacctagtacttgacatcggtggccaattcctgtgggtcgattgcgacaacaactacgtctcctccacttaccgccccgcacggtgtggctccgcccagtgctccctcgccagatccgacagctgcggaaactgcttctccgccccaaaacccggctgcaacaacaacacgtgcggcgtcacgccagacaacaccgtcaccggcaccgccaccagcggcgagctcgcgcaagacgtcgtctccctccaatccaccaacggtttcaaccctatacaaaacgccaccgtttcgcgcttcttattctcctgcgctccaaccttcttactccaaggcctcgccaccggtgtcagcggcatggccggtctcggcagaactagaattgctctcccctcgcagctcgcttccgctttcagcttccgtagaaaattcgccgtctgcctctcatcttcaaacggcgtcgctttcttcggtgacggaccctacgttcttctccccaacgtcgacgcttctcagctactcaccttcacgccgttattaattaaccccgttagcaccgcctctgctttctcccagggagagccttccgccgagtatttcatcggcgtgaaatcgattaaaatcgacgaaaagacagtgccgttaaacaccactttgttgtccataaacagcaaaggcgttggtggaaccaagattagttccgttaacccttacactgttttggaggattctatcttcaaagcggtgacggaggctttcgtgaaagcttcttctgctaggaacataacgagggtggcttctgtggcgccgtttgaggtgtgcttcagtagggagaacgtgctcgccacgcggttgggggcggcggtgccaactattgagcttgtgctgcagaaccagaagacggtttggaggatttttggagcgaactcgatggttagtgtgagcgatgataaggtgctatgccttgggtttgtgaatggaggtgagaatccgaggacttcgatagtgattggaggatatcagctggaggataatcttttgcagttcgatttggctacttcaagattgggattcagctctttgctctatggaagccgaactacgtgtgctaacttcaactttacctccgctgcgtagaaggaaaacgtttcaataattagcattatctcattctctcattcataataaatgccgcctgcggaatttaggttgagcttcgcaactacgagtttcaaataaactgttaaacacaagtattttctatttccttttgatacatacagggttcatgttttttaatttggataagcccctacatggttcatgtatcttataagtttgaatatttgttcagagacaaacgtaatccaagtgtgggacaccttcattgctctttgtcttgcattatatacacatttaaatgcatattttttattaataaatattaatgcttagtattgctaattttttttgttagcgaaagatttgagtttatgattgttttttatcattaaatcaattttatatttgcttttgataatacatgttaatattagcttttagataagattcatttacatgtatataaatggattttaatttaatcaatctcttttcagtaattaaaatactagtaatagttttcttaaaatatgttttcctggtcaacttcgaacacacttcttgacacaacttcatgacacggatgaaagatacgtcacttatgacttcatatggccaacaatgttcccaacatcggagtcaattcaacctcaacttgacatgacttcatcaccattcgccacagcttcaacacttcaccgaagcccaaggttgtacgctcttcgagttagatttaattagtttatttcacaaggttaaacgttaacttaattatagtggatagtttattggattctcaaagtaattatactgggattaaataactctgataaattattaatgtaattaaaaaaaattataccaatcatctttaagtatatagaaaatctcatttattaagagttgtttaaccttatttttaattgagataagataaacaatgccataactttttacatataaaattcttttatcaatataaaagggcatataaagagtatctttttagaattgggaaaatggccccccatttcccattgggccaagcatataaaattggtttccccggcccaaattttctatgggctgtattttttttttttgccaggacaagtcggtggtttgttaatcaagattgaattgatttatttttctttttctttttttttctaaatttgtataaattaaagttttttcccctaaaaaagtggacttatatttcttgagcccgacctggcccattttgtcattttacttttacaattaatttaaccgatagttttacaaagctctttaaacttcattaacttattcgttatc

SEQ ID NO: 410 - DNA, 5629 bp, Glycine max
atatagttatcttgattataacttatctaaaatacttttacaattttgacgatatatatatatatatatataataataataataatttataactaaatgatgttataaaattatttttaaatatttgtgtatcattttttagcaaattattaaatcaaattaataaaattaagaaaattgacccaagatatatgatttggtttaatttttataaagttgtaatattcactaacaaataataaaagtgactatttacttgcatgtaaattaataaaccactgacttaaaataattactgtatgacatagactgggttaaaatatattttaaaattttattttttaagtagctcatgcttcttggtcccattgattattgagattttatcattttttgtatgacatagacggtaaaaaaatctcaggaaattcaacaggaagaaacgagccgcagtgtcgcgtaagcaaaagaagatagaatatgccatttaaaatgcgaaaacgatactctttctctctctctttttaataattttattttagtttgttttcaaaaaataaaaatttaaattttagtctaattgtaaaagaaaagtacgacaaacaagtaaatttatgttttttttcttaatttttttaggtatttattataatggtatgcttgaaagattaaaaagaaaaaaactataaatattacattatattttaaataaataataattttttaaagcgctcacaaattgatgtgtcatataaaatagatggacagaagttatggaattagatagaattatgacacttttttaatttttgacaaatttaaattttcgaatttatcaacacactagagttaaaaacgattatttattattttatttcacatcccatgcccttatcaaaggaatgaatcaataatcaaacattcatgattcaacaatgaagaattgattcaattcatagtctcaatcttccaaatttatcacagatccaaatccaccaccatgattcccgatctacccctccccttcctcttctccttattcatcatcttcttccacctcgctgaatccaaaccctccctcaccgccacgccaaccaccctcccagcctccggcgccaccgtcaatctccgctggtccggcatcccttccccctccgacctcgacttcctcgccatctattcccctccgacctccccgcacgacaacttcatcggatacctcttcctctcgcagtccgccacgtggcgcaccggctccggcaacctctccctccccctcgtcgacctccgctccaactactcgttccgcatcttcagctggacccgcgccgagatcaaccccaagcgccaggaccacgatcacaaccctctcccggtcacacgccacctcctcgcgttttcggaggaggtctccttcgcccctcaccgtgggccccaacagatccacctggcgttcgttggggcccacggcaaggaggaggatatgcgcgtgatgtacatcacgcgcgatccgagagagacctacgtaaggtacggggagagggaggataagcttgatgggattgcggtcgcacgtgtggagaggtacgagagggagcacatgtgcgacgcgcctgccaacacgagtgttgggtggagggaccctgggtttatccacgacgccgttctcataggtttgaagaagggacagaggtattattacaaggtaataatgactaataacgttcttttattacatattaagttttgaaaaaaaaaatcttataatcaagatcaaagggagtaggtagttgttagtttttattttttgttgagaagctagagacacgccctcatacacttttttaaacacaccctctaatgaaggtagtaattggaacctgctactgttattggaataaaccatcaaatttttttttttgaaagcattattctctctcctaaagtaatgaaattaggatttatttgaatacaattttatttatccgtgagatttactgacctaaattcccgtggttatttagatacaagctacttgaagaacttgtgaaaatatacaacttattagaactttttatataagtagtttttaaagtattagaatagttgttcaagtattgaaacaatccttcaaattagtctctcagcgttagtaaaaatatatcaatgtagagaataaactgacggatttttaatatcttagggactacttataaaacttcattactttaagattatttaggaaataaaataatactttagggacaaattgttggtttactctatctattcgggattttgttctaaggcttattaatgttggtcgctaaatgtggtaaaattatggtcctgagtgttggttattttggctctgaggctgatcaatgctactctagtgtgtcttgtggggttacattaagtggcatgctgcttaggtgctacatttggcactaatgggtgtgtcaagctggcatttgaaagggcttatttatgtgaaagtggttttagaccttttaataagctcttgatttgttttaaagagtttattgcatcataagtgtacacatatactgtatactgtattcaataggatttaatgactttactcagtggtcctgtttattaatgtgatgtatggaagtttgcgtaagaacatttcacactattaacaaatataaattgaagaataaatgcaccagttatgtagagattttttgcaccgttatctaatcataaatggacagttatgtgtgacaggtttattactagtaacttttataataacttccagtttattgattaatctttgtatgctgactctgtaaaaaatttatgttattagccaataagaaatcatagtaggcatgaattttgacgtaattattcaataagtttattatacctggcaatttctaatttctaattggttgacattgtaaaaaccctttacactctcaatgcatatactattttctctaaaagttatatatgatttcttatttattgacattgtaaaaactttacattgaccatgcatgcctattaaactcgaactaaattctattttaaaaatcttattaaaatgtgtcagtaagtttcatggttacacaggtgaataagttttcattttgataaaagaatgttgaataagagtttaattaagcccaaacccaaatatttgctaatgcccaagtcagggtttaattttgcttttgtcaggactaatttgtctggtgttaatcaatttctggaacaaaattgtttctttgctccaaaacagtgagaccttatgaatggagaaatgttgagatattaactgtttaaatctaatttaatatgtaccaggttggaaatgataacggaggttggagtgcaactcaaagttttgtgtcgaggaatagtgattcagacgaaacaatagctttcctgtttggtgacatgggaacagctgtaccatacaatacgtttctgcgaacgcaggatgaaagcatatcaaccatgaagtggatcctccgtgatgttgaagctctaggcgacacgccagcctttgtgtcgcacattggagacattagttatgcaagaggttattcctggttgtgggaccattttttcgcccagattgaacctgttgcctcccaagtggcataccatgtttgcattggcaatcatgagtatgactggcctttgcagccatggaaacctgattgggccagttatggaaaagatgggggtggtgagtgtggtgtgccttacagtttaaggtttaacatgcccggaaactcttcagaactcactggaaatgctgcagccccaccaactaggaatctttattactcatttgatatgggagcagtacactttgtgtatatttccacggagaccaattttgttcctgggagcaaacagtacgacttcttgaagcatgatttggaatcggttaacaggagcaagactccttttgtggtggtgcaagggcacaggcccatgtacactaccagccatgaaaatagggatgctgctttaagaggaaagatgcttgagcacttggaacctctgttggtgaataacaatgtgacacttgccctttggggtcatgttcatagatacgagagattttgtccactgaataacttcacttgtggtgttaatgcgggtcacaatgcaggggacaaaaaaggatatactgttcacattgtgatcggcatggcagggcaagactggcaacctgtctgggaaccaaggccagaccatcccgatgatccaatctttccacagccaaaatggtctctgtaccgcggaggcgagtttgggtacacaagactcgtcgctacaaagcagaagctcgtgctttcttatgtgggaaaccatgacggtgaggtgcatgatcagttggaaattctggcatctggggaagttgtcagtggtgacggaggctgtagtattgctgatgctaattctaaagctggaaatgtgattgtggaatccacattgtcttggtatgtcaagggaggaagtgtgctgctgcttggtgcattcatgggttacgtttttggttacgttacaagtgcaaggaagaagtctgaggtgccagagagcaattggactccggtgaagactgaggaaacttgaactgtagaggaaacttgaactgtatattacagttactgtttaccaaattttcaagtaggtcatgaaggttcacagaaaagaaaaacaagatggcatgaaggttttgaattgtgagatttccactcgtttttgtttgattaagacacctaagctgtcacctcatatacttgaggacttatctttgtatatatgcatttttttttcttgcttaattatttcttttaaggcatttcatataggaacttgtgttgttgtacattattcaaggtaatatgatctgttggatgagaccatacactattgtaacaaagaaaaaaaagtgttagatttgattgtactattgatacacaaactttgatgtcgcaataggaattacccaatttgatcattaaattttgtatgtcagtccttttttatacacaaacttagaagggagagatggttgttactcttcaaagtcaagcaaacctctggtttcaatgaacaaacaacattcttaaacgtaactcatcaatttttgaaattattctagattcaaattcgaatcatgtgtttattatgggccaatagcactgaaagtagaaatattacgtttcggtgcaagtggccatattcagacaagaaaccagcgtgctgtatcatatgcagacaaaaattgctaaaataatcaaattgtgtaaggcagaaacccagaaaatatctgaggggtgattcggtcatcaactagtttcatggacatgcagttcaatcatgattattcttgatcacgaaaggaaaaaggaggaccaaccaaccagtgtcacaaaaaaaggaatggggatagtgacaccccaatattttggctcgtgctcaaaatgagatattaaatgaagataagaagacaaacacaaagacacatacacacttcctctttcactcatttttcttttcttctcccttcacaagtcaaagcaacattacataaatattatttctgttctgtgtgttactatttcggtat

SEQ ID NO: 411 - DNA, 3272 bp, Glycine max
gttagaaggctctggataccatatttggatttgtgatcatgaataagataaaagagaataaagtgatttcattgataccatgaatgattacaagaggagtatttatacactgcaataataagggataaaactgatacactatattagcagtaacaaactgcaacaaacttaacaagagataaacctgatagactgtataagcaataacagaacgtaaaacaataactaactgtttgcttgacaattttcctttacaaaaactaaaagccaaaaacattatatttgcaaaagcgtggagcaaaattttcctaatgacaaataatgcctggccatgagtaaaacaagtgacaacaaacatttgggatttaaaagataaaaaagaaaaagagaaagaaagagtcaaagaataatgttgaaaacatttgtttagagtgactattggaaaaaattcaaatcacatatactaaagataaagtcatataagagtgtatatcaatgagaaataactttcatcccttgaactagtttttgaagttaagttaagcctaaactcacatctttaagactttaagatgatataaacctatatccaatattattcaaaaaggatcacccaccattattattcatgcactaggtccaagatcccacattagttagaccactcaccaatcacaaagcttaattgaataaaaaaattaatataatgggtcggggtagagctgagcataatccatctaacctccaattccatagtcaaagctggtctgcccttggaattgtatttggattttgaatacaatataatacattagatgaaacaatgttgttgttgttgctgttgtactcatctgactgagcttcgtggtcagtagctttgaataatactaataacaaaagaacacgatgcatggatgggatgggggtagagctcagcataacccacctacctccaaacaattattaatatgaagcaatgttgcactataaaaagaggtgcttcttggttatagtatttgtaatacaatggcggctgctattgaaatccccaaaatagtgtttccaaactcctctgcccaacaaagggtgcctgtgatcggaatgggatctgcccctgacttcacatgcaagaaagacactaaggaggctatcattgaggccgtgaaacagggttacagacacttcgacaccgctgctgcctatggctctgaacaggctctcggtgaagctctcaaggaagctatccaccttggcctagtcacccgccaagacctctttgtcacttccaagctttgggtcaccgaaaatcatcctcatcttgtcgttccagctttgcgcaaatcacttaagtaagaaacttcatttaaccccactttctttatcgccaaatcttacttattactcacttcatcaactttttggcatgcagaactcttcaacttgagtacttggacttatatctcatccactggcccctcagttctcagccagggaagttctcctttcctattgaggtagatgatctcttgcctttcgatgtgaagggtgtgtgggaatccatggaagagtgccagaaacttggcctcaccaaagccattggagtcagcaacttctctgtcaagaagcttcagaatctgctctctgttgctaccatccgtcccgtggtcgatcaagtaagtctctctctctgttgtattttgttttgtttatgtgaatgattaatgataagatgaattactactgttacaggtggagatgaaccttgcatggcaacagaagaagctaagagagttctgcaaagaaaatgggataatactaactgcgttctctccactgaggaaaggtgcgagcaagggcccaaatgaagtgatggagaatgatgtgctgaaagagattgcagaggcgcatgggaaatccatagcccaggtgagtctgagatggttgtacgaacaaggtgtgacatttgtgccaaagagctacgataaggagaggatgaaccagaatctgcagatctttgactgggcattgacagaagaagatcatcacaaaatagatgaaatatatcagagccgtttgatcagcggacccaccaagccccaagtcactgatctctgggatgatgaaatataaactaatgtgcctcgtgctctattttataatccatgtatgttaatttctttcttttcttttctttgccttcgtctacttgtttgatttgaggtttaaataattgatgccacttattttatgcaacacttgttttccccttttactcaaaacccatatgcattgactaatctttcgtcttcgatttgacgaggttattacttactttttatgggataaatcgtggatctcattcattactagcaatggaaaagacacgttaacagagtatgaatcatcaactttaatgaagcctgactaactaacaaaatcgtacgtcgcgtgtttgtagcaacaataaataatatgcgaaataagtccagacacaaattcggaaccacagacaatgaataaattaagaatgcgcggcataggacatgaataacctattcataaactcttgctattgatctaagaaagttggattctagtgacaaatgctcaggaagtcaaatttcttttaaccaattaaaagtaaataattagatgatagtgaaagatgattttatactaacattaagttaaatttatattaatctaaatatctatactctttcgtgcaagtttctgtggtaaatgcccaggcttcaaattttgcaataaggtatgatcaattattaaaatgagtggttcatcagctctactatttcaatattgttgtttgttaagaatcgagtccaccacatatttagacagattatttaaatttatttgttgaaataaataatattttgttttttaatgtattcatctaaattgctgctaaaaaaatcatttttgcttattttaaaaaacaaatcatatttacttcttaaaaaacacttatataaaaaaatacgtatttaaaaaattaaaattaaacaaactcacttataattttttttttcattcaacgcattaagctatatgttttctttaatgcattctcttaatgggtgaaattaaactgaaaaaaaccaataaaggcgcgagtgaaagagattgccaacaacatacaattttgttagttttatacacatacacgagccttcatttccttatttattttctctacataccacaaaaaaacaaaaacacgtgcatgcatgttcccactagctttttaa

SEQ ID NO: 412 - DNA, 8866 bp, Glycine max
ataaatgtttaaaaagtaaaaataaaaagttataagatgtagttagatagaagtattccaagtacatgaacatatactggaacatatcacactaatcctaccaatgcatgttggtgtgatcggataaaagtgtaaaaagtaaaaactctttatattgtcagtgaataatgtttactcattaaaaagtgttggtgttttaaataagaaatcaatgctcatacactgtcggtataaattgcatagcttatcagaataaatctctcctgaactgttttgtctatcaaattcttcctttgttgagcatttgaaacatggcaaacaacttccaacacttcaattccttcagcccggagattttcagccgccacatcaacattttgctttagcaattcaaccaaaaaggaaaaaaagaaaagaaatcagcaatgaacaaacatgtgtgcagagcacaagaatcacttgacaatcctgttaatggtagtaggtgggaatttggaaacagataaagcatttgtacgaactacgaatcaataataacaataagtcaaaaacaataatttcatcctaccgttacatgaatcacacacatcattagactcaattaaaaaccaaattcatgaaatcgcttttaatcatttcctccaccatgcttgttataccgaccacccttatatcatttaaaaattagtctctccttcataatatgaatcaaataaatgaaaagaagaaaaaaaaatccttaattcttgtaacccaaatacaaaaccaggatttttttttctaaaaccaaaagaaaaagatgaagactttgacctaaactccataagaaaagagattgaaaacaggaaattaattgaacctgtttgcgagaagagatgacaacagatgcaccctccaagccaagcctatgtgctatggcaaagccaattccctgagtggaagctgtcacaattgccactttcccttcaaatctcttacccaactcagataaagaaagaggctttatttgtgtctgagaaacgaccatttaaggagtttactctccaatgctaaggtgtggaagaaacacaactctgactagggatgagttatcaattttcaaaaaataacacacctcaccctttcaacaagttgcaggtgacaaatctcaaccatatattaaaaaattaatatatctaacagttaaaacgttagtagttagagtgagtggcatctatgttttttgttcccaagattccttttgaaaactactatgttctgtgaaatatcttccctcaaattaaaaccctcttgtttgctttcaacaaacaaattgatatttttgacaggtaggtgaactctaaccgcatctacttgttataaagctgcagttgcagttgcagttgcagttgcttttgaatattctataatttgccactttttctttgtttttttacttatgatttttaggtaagttggggaaaagataagtattatatactatatatgagatatttgatagagtgtaaccaagttttctggataactacatacataaggtgtggtgtaattaatctgagcacatatatggtgaaacagttactgaaatgggagaatccaagtttgtgtccttggcatttctactggtttgtttagtggtccaaagggtgtggtcacatggatatcatcctctttcaaaagttgctgttcataaggcaacagtatcacttcttgaccttgcttacatcaaagcatctccagcagttcttggactacaagtaagttttaacactgttgtgcaatgtaaattgatcagtggtgtcacatgtaaaccctcttgatgatcaccaatattttttatgtattagttttctacttgccatcttgttgcacattgcctgcttgttgctgatgtaagttttactggattctgtaggagcaaactgctgaatgggtaactctggagtacagttctccaattccatcaattgatgattggattggagtattctctcctgcaaactttaggtaacattcaaaatcagagcctatttgaagtttagccagaaaactggctccaaatttggagtcctatagaattttacttattgtttcaattaaattcttgtcttgtacaaccaaacttggttgcttagttttaattgatttttcctgttttgtgcatttcagtgcttccacatgtccaaaagaaaaccgtagagtctacccaccactattgtgttctgcacccattaaggtacatcggtggatgtgaacactaacctgtaccatattttcataatgagtttaccacaatgatttctttctgttgcttttcttagccaggagaagttatgaaagagagaatagaattgatggtctgatgaatgtttaccccattgtgcagtatcaatatgcaaattactcaagtcccctctacaaagaaactggaaaagggtttctgaagcttctgctgattaaccagagatcagatttctcatttgcactattttctggtggcttgtcaaacgtaagccaccattagtttgaacaagtggatgttaatattctatgattcttatacaaacaaaattgcatgcacagattatttggaagtagattagatccatgagaatattcttgcctttttactatttacttttaaacagtggatacaagttaacaaatccttttaaaggctactttgtgggctgagtgagaattatctctttttcagtttgtctttttcgttcacttctgttctgctttcctagcagttcatattttcctttagatactgtggaagccttagtcttacctccgcagattttgccattcataatcaatctatctatacatggatggttaggattagctcttcttatgctttcatctctcacctgatatgcttcctatataggctagttaaataatatgaacggaatgtaggaaagtttccgtctcattgttcaagaagtgaacggaatggtttggacactgctaaacagaaagttgttttcatccccaaattaggagtctcaaagcatattcatagaacaacaatcaaatacatgctcacagagaagttcatgttcacagacatttacacaaattcacgagctcacctgattttccacatttgcatacttgcattggatgacacacatttcttttggatttatgtatattttatatgataatcctttaattagtaatttcaatcacattgtctaacagtaacaatattttgcctctctaaaactcctaatttgcacatctatcatgaaatagctaaatgcaatctcttttttgtttctatttacatcatgacagccaaagctagtagcagtatcagataaaatagcttttgccaatccaaatgcaccgctttaccctcgcctggcactaggaaagtcatggaatgaggtaagttcattttctctagtcctagactgcataaaacttaaacagttgatattaaaaggataaggaagttccctatgtaagcaaatgctatgtgaacttgtgaagaaagaaagcatccagcatgctgctattatctctgagttaattttttaaaatttttttgcatttactcttgtttttttttttttttctttaaatggttcttgcattttatcaaattaaattaaattagtataattttgatcagatgactgtaacatggacaagtggatatgggatcaatgatgctgaaccttttgttcaatggggtccaaaagaaggggatcgtatgcattcacctgctgagacactgactttcactcgtgatagcatgtgtggtaagggaacttctttgatatgtacttgaacctaggatttggaatcaacaatggtagtacaacataattaagagattatacagttttcgatatatgaatattcatggtaaaaacgatttttttttataaaaaaaaggcagaaaagtgttggagaataatttatataaagtatgttattaaataaaatgtgtcatactttctagtgtaccaactatcaatctaaaaccatattttcttgtttccaaattgttcttgtcaagaactaattcatccctagatcttaaattgttaggtgcaaataaggctttctccacaaaatgtcttgtcacacaaaccctttaggtttggcttaaggtgtatacaaagcactagccaactttaggtttgatgtgcacataaagtgtttaagcttcatatccttttacaaagtgcttagtccaccattgggaacatcagtaatcttgaaagtttagtttggtggaaaaaaaataaaaaaatgttgctcattattgcacattaacattatctatttatgaacaggtgcaccagcaagaacagtgggatggcgtgaccctggatacatacacaccagtcatctgaaagaactgtggcccaacaaaatgtatgttattctagcttaggcctagttttatgcacattttaatcttatgcttccctttcaaggtatacgccatattcatgaatcttatattcagattttgttttctttatagtagattagcttttcattaattttgtgagaacttcactctaaaggcataaacttaattgatattgctatctattatgagccaacatcaatcaaatttattatttaggttaaatttgattttttaatttttttttcaatttaatcctttaatttttaaaatagattcaatttggttctttaattttatacgtttaattttgttttctaatttttaaaatcgatttatttttttggaaaatttgattttgtagcggtttaaaatcacttagtgacagttttgaacagctacaaagtataatttcttaccatttagattaaaagaccaaattgaattgatttaaaaaaattagaggaccaaatcaaacaaaaaaaaactacaggatcaaattaaatctaaaaataaattaggagattaaataactaatttaacttttttttattgtcattatatgctactatatagatatcatctagattttaaaccttcactaccaatagaaaaataacaactataaatttgctattgagctcctaactaggaaaaacctattgagttgcatcatattttctatttaaattagtttgctataatgctgcatgataatttaattgtgccttctgttgattggacagatatgagtacaggataggacacaaattaaacaatgttacatatatctggagtggaaactatcagttcaccgcacctccttttcctggacaaaagtccttacaacgtgtagtcatatttggagatatgggaaaggtttgaactgttatgaaaaagtatgcatgcatatattcaatggatggcatctgccatgtttctcagtaacgttggtcctaatatatgctgataatttgaaatttaaaattgtgatatgctcctcatacccggagcatattatatcaaatttatctttcttggcctttctaaattatagtatacggtatcaaaccaaagaatatgctatagaatgaatcttcatagataagagttctttccttactatttctttaagaagctgtcattgttaagcgtataagtgttaacaaactgcatattaagcgtataattgttaaccatacaatagtttcagttggggccacatcagtcacatttgtccataacttcccacaatatcaagaatcatgatgacactgcaaaagcgaccacaatttaaaaccttgtttgagatcctattgtcctcaagtgtgaaccacaatccttttatgatttgaattctctaagtatttgataatatttaaccatgcagggggaagttgatggttccaatgaatacaacaatttccagcatggctcaattaacactactcagcagcttatccaggacttggaaaacattgacattgttttccatattggagatatatgttatgcaaatggataccttcctcagtgggaccaattcacagcacaggtggagccaattgcatcagctgtgccttacatgatcgcaaggtttttatatagcttaccccaaaaattagactaggaagtgttttgtttatttatttatttttaataatgattcccttgtggtgattttgtcctttacagtgggaaccatgagcgagattggcctggaacaggatccttttatgagaacatggattctgggggagaatgtggtgtgttggcacagactatgttctacacccctgcttctaacagggctaagctttggtatggcgacatgacttcatacatttcttcaaattataatcaataaattagcgaattgttagatttttcccgtttagaaaggttatcttcttttgggtttaatgatttgagcatgaagaaagtgaatcaccaagaattacaaatgccattcaataaagagtaaataatcaaattgaggctttgaaataattttataccaaagtccaccaatgcttttggtattaaagctttaggtagaaaatactcaacagaattaatcaggtatttggaaaatgttacgtttctacactctttcaccaggtattcaattgactatggcatgttccgcttctgtattgctgacactgaacatgattggagagaaggcacagaacaatacaagttcattgagcattgtttggcatcagttgacagacaaaaacagccatggataattttccttgcacatcgcgtacttggatattcttcttgtatctgttatgcagaagagggatcatttgctgaaccaatggggagagagagttttcaaaagctctggcagaaatacaaggtggacattgccatctatggccatgtgcacaattatgagaggacatgccccatatatcaggtttcttaaaccttgtgctcttcttccattcaaattttgatgaatataaggctaacatgtacaataagtcaataacaacacaacatccagaattaagcattaagtaatcaagatgtcgagttccctaatccctaatatgctcttcttgagaaaaatgaaacaataccattttacatgccacaaatagcatcatttaaacctgcaagagttggaatgagaatgcatattttctcgactaagaacctttttttacattttgcaacagaatatctgcactaatgaagagaaacaccactataagggaagaaccttaaatgggaccatacatgttgtagctggtggtggtggagcaagcctttcagcatttacttccctcaaaaccaaatggagcatctttaaagactatgactatgggtttgtaaaactaactgcttttgatcattcaaatttgttgtttgagtacaagaagagcagagatggaaaggtttatgactccttcaaaatatcacgggattatagagacatcttggcctgcaccatggatagttgcccaagtataacaatggcatcttgattgatgaaatgatgaaagcttcaatgtatccagccgtgttgaagcagtgagttatgagtagacttagatgttgtatgcggcagcaagctgtcaccttgttcaacatggcttaggtagaatgcacactcaatttaagctgcgagcactttcttgtacctaaaatagaataggagggcaaaatacaatgctatacaagcaattccagtaattaccaaaacccaatggaatcccgatggatagtcaaaaactgtggtttcaaagttcattccaaatactcctgctacagcagcaaatactgcagctaccaatgtagctgctgtaagaagcaactcaaactgtattagctggttttgaatatttccctgtaatagatagagtgaaaagtaacgctgcctggtttacacagtttagagtatcaaagaaataaaggaatagacagagaatgttgcaaattattaatcttagcataccaattttatgttgataaaatcttctgtgtcgtcaatgtattctttgagctgcattaccagaaggaaaaaaatcaatacttagcatttgcatgaagcaccatgcctaaataataaaatcatacgctgttagcttacataaaaagtcactatggggactactcattagcaaaaatcagaatgtaacagctgattggctgaaggcatgcctgagctaatttaatgttatatatgtacaccttagttatattagcaaaaactatgatatccaacatacaaatactctgttatatgttataagcaacatgggtagattctaatgctacagctgagtaagtcaaatttctcataccgacaatatcgtgttaagagtattatcaatgacaataaaatatgcttcaagcaacatttccagtggctcaatcctttccccattatcagacgaacccattgaactaccatgtttactagaatttccaatgctgctgaaagccctttgcaacatctggactccactaattgttcgctctggtgaagcaggagccgactttgaaattagtctacctgatgcacgagtttgaaaacaatcattaaaagtgcaagtatccgatcttctctttttctcagttaggcacatctcagccatgtcaccatcatcatccatgagatgttctatttcatcacgaacctgggaattaagaataagttactagttgcaggtaatagaaagctagaaaaatgagaatagtaatcaagaataataattctacgttgatcaaccttctgaactcgttgagtcaaagcaagcaagtgacctttaaatcttcgaacacgttccagatttagagtactgatagatgaggctagttcatccagcacaggatatatttccatttccagttcatttacctatcaaatcaacattcttcttaatatacgggattcaagatgaaaatttacttacacatggctggaagcttctccaatgtctt

SEQ ID NO: 413 - DNA, 5418 bp, Glycine max
agttccaagaagctaaccttgagtttatttgctcctcaatgtgattgaagtcagctctctgaattgcttcatgcacaatcttcaacttcgtgtttttttagttaccatatgaatctcccaatttatttagattgtacaataaattgagaaaactcaaataattaaatccaataattttttcttaaaaatcatttcaatctaattcactgtgaacacctttatctaaaattttacatgaaatttcaaatttaattcaattcttactaacataataatgctggatattttcttaattccaaataatactattaaatattagattcaatgtttataatatattccacaattgtattttttttatttgtaagaattaaaaataaatatcaaaaagtttacaacactcacatatcctaaccaatcaattgagttaaattccttatatagggattgtatgaattttcattttaatacatatatttaaaatcttattattgcaaaaaataataatctaatacttttttttaaaatacatgaatgtatgaccatgaaaaatggcaccatgttaaaaaaaactgttttaaatatgaatattttctctcataattaatattttttctatgcagtattgtttaaaaaaaaaaactgtttcttcaatttctgaaacaccgaaaaagagagaaagaaaaaattattgttttttaatttaatatggtgtgcttactcacaaagcagtcttacactaatctcgaaataaacttatcagatggtcgaaaatcctttggcacgttaaaacacgtcgtacaaaagatgcagctgatctgattctccacttgtctcaagcagacatcacactgatcacaggtggaaaccaaatttgcctaagttccaaggcctcggtgtgactcagccccaagtgacgccaaccaaacgcgtcctaactaaggtgtagaagaaacagatagtatataagtataccatataagaggagagtgagtggagaagcacttctccttttttttttctctgttgaaattgaaagtgttttccgggaaataaataaaataaattaaaatcttacacactctaggtaggtacttctaatttaatccacactttgactctatatatgttttaaaaataattataatgcgtacttactttctcattatactaaatttaacatcgatgattttattttctgtttctcttctttccacctacatacatcccaaaatttagggtgcaattttaagtttattaacacatgtttttagctgcatgctgcctttgtgtgtgctcaccaaattgcattcttctctttatatgttgtatttgaattttcacaccatatgtaaacaagattacgtacgtgtccatgatcaaatacaaatgctgtcttatactggcaatttgataaacagccgtccattttttctttttctctttaactatatatgctctagaatctctgaagattcctctgccatcgaatttctttcttggtaacaacgtcgtcgttatgttattattttattctatttttattttatcatatatatttcttattttgttcgaagtatgtcatattttgatcgtgacaattagattgtcatgtaggagtaggaatatcactttaaaacattgattagtctgtaggcaatattgtcttctttttcctcctttattaatatattttgtcgaagttttaccacaaggttgattcgctttttttgtccctttctcttgttctttttacctcaggtattttagtctttcatggattataagatcactgagaagtgtatgcatgtaatactaagcaccatagctgttctgcttgaatttatttgtgtgtaaattgtaatgtttcagcgttggctttccctgtagctgctacaatggtactgtatatctattttttgcattgttttcattttttcttttacttaatcttcattgctttgaaattaataaaacaatataatatagtttgaactttgaactattgcctattcatgtaattaacttattcactgactcttattgtttttctggtagaattcattttaaattgaaggataaattaagaggcaatacttgtaaattgacctgtcataattacacaggaccctgttttgtgcctttttgtctctgtctttggttttgcatgttagcctcacacagatatttagtagttgttctgcatacaagcctcacacgtatactaaaccagtggacctcaaagtcatggccttacacctattgcatgcgagtctgtgacacaacccctggtttccatattgcaatgtgctacgccgtcgtccttgtttgtttccatatgtatattgataccatcaaattattatatcatttatatggtctggaccattacgtgtactctttatgacatgtaattgagttttttaattaaaaaaatcaatgaaatttaactacgtagcatcatatagagataattgactagaaatttgatgacttattctttcctaatcatattttcttgtattgatagccccgctgtcccttttaaactcccgagagagtataaaactgcatcgaatattacaagatgcactcttgtcaaatgaagggggggaaatgatactacaagccactaggcatggtatgatgctaaattaaattgtgcctgcaccccaggatatttcatgtgggattcatcatttattgaggaaaactctccaaattgaatcgtgcatttatatttttttttccatttctagatttcttgaaggcttatggtataggcacctacaattatcagcacttctctctattgataaacaattggctgtaataccacagtagagaacgatcacaacattttgtgctggttactttttgttttatggtcatgatttcactctctctaatctgtcacttccctccattcattttgtacttctcatatttttcacttcctggttgaaaattgtagttctcttggtacatactagtattagacattcagcaacaacaactgaactgaacttctttatactttgacacagggtctagcaaaggaaacaataatgggaggtggaggccgtgtggccaaagttgaaattcagcagaagaagcctctctcaagggttccaaacacaaagccaccattcactgttggccaactcaagaaagccattccaccgcactgctttcagcgttccctcctcacttcattgtcctatgttgtttatgacctttcattggctttcattttctacattgccaccacctacttccacctcctccctcaccccttttccctcattgcatggccaatctattgggttctccaaggttgcattcttactggcgtgtgggtgattgctcacgagtgtggtcaccatgccttcagcaagtacccatgggttgatgatgttatgggtttgaccgttcactcagcacttttagtcccttatttctcatggaaaataagccatcgccgccaccactccaacacgggttcccttgaccgtgatgaagtgtttgtcccaaaaccaaaatccaaagttgcatggtacaccaagtacctgaacaaccctctaggaagggctgcttctcttctcatcacactcacaatagggtggcctttgtatttagccttcaatgtctctggcagaccctatgatggttttgctagccactaccacccttatgctcccatatattcaaatcgtgagaggcttttgatctatgtctctgatgttgctttgttttctgtgacttacttgctctaccgtgttgcaactatgaaagggttggtttggctgctatgtgtttatggggtgccattgctcattgtgaacggttttcttgtgaccatcacatatctgcagcacacacactatgccttgcctcactatgattcatcagaatgggattggctgaggggtgctttggcaactatggacagagattatggaattctgaacaaggtgtttcaccacataactgatactcatgtggctcaccatcttttctctacaatgccacattaccatgcaacggaggcaaccaatgcaatgaagccaatattgggtgagtactaccgatttgatgacacaccattttacaaggcactgtggagagaagcaagagagtgcctctatgtggagccagatgaaggaacatccgagaagggcgtgtattggtacaggaacaagtattgatgaaccaagcaatgggccatagtgggagttatggaagttttgtcacttatcacttaattagtagaatgttataaataagtggatttgccgcgtaatgacttgtgtgcattgtgaaacagcttgtagcgatccatggctataatgtaaaaatatgtggaaagtgttctgcttataactttcttccttaaatgcacactccatagaacaatattattggtactaattttaatctgaattgaggatgttaactggtaggtgaggccaactttaaccctactactgtcgttttacaaggttattaaaatcgatttgatgttattaaatttgaaatagtcgccatttaaaaataaaaaaatatagaagacaattaaattggattggtttttagattcaaatttaaaaattaatctaaactaaactaaaattttataataacatgtcttataatgtattaagtttttattattgttattgagtttggaagcatataataaggaacataagttaatatttatgatccaataagatcgacttagtattagaatatttagatgatttgtatgagatattcaaacttcattcttatcatagagagacaaaagttaatattgattgtggagcaaaaaatgttattgggagcatatgcaaagataagatggataaaatatgctgcagcctgcagagcaagtgttttgtcaagtgacaactattcatgatgtgaacacaagaatcctttctatttatctatcccacataaaatacttattttaataatggtggtaaataatgattaaaatatttgattattggttaaaataaataaggaaaatataaacattctcatggaaagtttttgttaaagaatttgccaaatattgattaaaatatttgattcttggttaggaaaaatcagcaatgcctaagaatatttttttccaaaccttgtagagtaccaaacacaatctaagaatttttcaaatctatacgtgttcagaaactttctgattaatttaactggaggtaattatacttttatcaaatttttagtctttgaaacttttttttcttaattaagttactgaattttttttaattacatctctcatctaacatttgtatgaaaaattaaccgcaaagatctcatgagaggtgaagatacaaaactggtgcctttagaatttgttatatgcacaaatatttgtaaagtttc

SEQ ID NO: 414 - DNA, 3771 bp, Glycine max
tgctttcaaaattgctttttatgtgacacgttgcgttaaaagtactcttatactacgtacgtagtacgtacatcattgaaatattgaaaataattttacctaacattttcaatttttaataattaggtgtgttttgagattgtttggcacctaaccattacatgtgtcataacatagatatagatggcgatttacaattatttttaaatataatatttttttatcttaaattagagataataagataaataagtattttttaacacattaaattagagattaatttttgttatgatatgtgattgtcatccgtccaagaaaattttatacacttaaaaaaaatcaaataagaatttgttattaaatatatcattttttttccacatgtaaacaaatcaatatcaatagtatgagttgaataaatcaagttaaattgggttttcaagttcttggagtcaatctataggtccagaaactcgagaagggtcatataccaatttcgagaatactaatccccatctcaaaaatatagaaggactaacaggtaatatgaaaaatattaaacctataataggcagtcatatgtaccaggaaccatgatgctccaacaggtaacaagtgaaagtaataaaccaccgacatgttagttaacaaaaatttaaaaccaagagttaatcctcaagcatgattctttctacttttctacgattctaaacggcagcataaagacgccaaaaatctccagctctggcccttgggccccttctctagcaacattattgttcaaccttaataatgttataatttattattattaggtatttactattaattgacgtacaagactgaaacgcgtagccaaattttgtgactcggaaaggataaacgaaggaagttgggccaatgaaatttgtttggcagtttctcacctaaagagagatgggtgtggacgtatcgtttggccttataaggagtgactcagctataataaggagtcaccaatagcattcacaactcacatgcctacttagtttatttttttgtgtgtgtttatgaagagagagaagaagtgaagataagcacaaggagtgtcatctagtcagctactaccaaattttcagagtggactattcttcctttattatattcttaattaccgtgccttatccgaccctctcataccaaacccaacccaacccaaccaactatatttcaaccagccgcggcgactaaacaacgaccacaccctcaaaaccatttccaactaccaactactctctctatcactctcccatggcttcctcttccctctttctctcactctctctcaccctttgccttgtttcctctctctgctatgctcacaaatcttccttaaccctacctgtgacaaaagacgattcaacccaccaatacctaacaaccctctcttatggcacccctgttgagtctgcaaaattcgtgcttgatctcggaggctcaatcctctgggctgactgtgcatccagaaccaccccatcttccacccttgccccaatcttccaccgttcaattcgctgcctcacggcaaagggtcctgaaattgagacacatagatggctctcgagtctcgcaaatcccatagatcaagatcagccgtgtcaaattcctgcagagaacagcatctcggggaaaagggtcaccgaaggagagcttgtggaagacttagtgattaatcgctctcacgagcttctcttcacttgctcacccactcttctcttgaacggtttagctaccggtgccaaaggcatggtaggtcttgatcgatctcgcacttctttttcgtctcaggtttttcactcacttggaactcagagaaaaatcactctttgtctctcttcctcttctgggattgttcaatttgggaatgtggcgcatgaatcccaacccgggtctgaaattttcagatctcttacttttacaccccttgtcgcgaaccaagaccaaacacagacacacccttccatcaacgttaactccgtcaaaatcaacggcaaaaaggtttctttcgacacccccttgggtgggggtgctcagctgagcacggtggtgccttacaccactctccaaacctcgatctatgcaaacttcgaaagcgcttatttgaaagccgcttcgtctatgagcatgaaaagggtcgatccagtttccccctttgggctctgcttcgaatccaacggcgttggaagctcccaagtggggcccaacgtgccggtcattgatctggtcctgcagagcgagatggtgaagtggagcatacacggaagaaactccatggtgcaggtgaacgacgatgttatgtgcttagggtttgttgatggaggtgagaatccgaggaaccctattgtgattggagggtatcaattggaggatgtgttggtgcagattgattttgatacttccatggtgggattcagtccttcgcttctgacgaagcatgctacttgctctcatttcaaaccctagttttcggtgaatcgtgatgattatagtttattattatccataccacatagtttttctttagattaagaagagttttgaggagtttaacacgttctgtaataacccttttattttttttttctttcttttttgctctcctgcggtattatctgtataaactgcttaagtggcctatgttaaatggcgatggcatttttgatggcatttttatttgaaattgaaatacttctccagtaaggaaaatttggttgagttatgacttgtgacttgtgagtattgccccatttgatgtaagcatatgattgactgattttgtttttgtttaattttaattggtgggtgtgattgataagaaacgcattttattgtggaatgatcatagtgggaaaagcatatccgtttataagggacggtaaagatacaagatacaaatacagctcatagcacacagtttttctcccgaaacaaacaaaagatgtggcgcacagaatatctttttattccttcaagatgctctctagcgatacataaattaattacccatacttttattttttcccccataaaatgaagcttctggactatttttcttcgctgctatagtcaattcaaataatcttaagaatgcaagtcttcaaagtacagcgactcataatctgtggcatgggcttttgtatatattttaagcttattgcgcttcataattcaaatttcaattataaaatccataaaaaaacaatttttttttttatgtatgacgtcggactataattaagtgcatcatcactctcaatttttttgtttgagaatatgcatcactcttgtattaataatcctaagtttgaaaaaatttgacgcgaaacaaaaattagtggacgcttgcgttggtaaacgctatcaaagtcgctccttttaacagtgacttgtccccatcccttgtcagtcacattattagaaagagaggtttaaggattttgtttacatgaataaaaatttatgacatagacatataatgaaaattaaattttaaaaagatagagattaacttaaaaaatgatcacaaagacaaaaatatttattcactcaaagaaaatttaacattatgaaactggtgaatccgtatttctttatgttgccagagttctcttcctccaactaggcaacactgcagcatcactgtatgcttattaatcttatgagatgtactataatttgcaaataagttccagatagtttattgttcgccattaatgttagaattaagga

SEQ ID NO: 415 - DNA, 3584 bp, Glycine max
tgcaaaaacgatcggccacaaataattgtcatcacgcacttggttgcagaaagtatgcataaaggaaacacttacttggcatggggaaatcaccattttgttatttattgtaggttgcagaaagcatgcataacgaaaacacttgcatggagcttgggaattagtgatatgttacacaaataagaacgatgccatcgaaaggtttaacaaaaccgtcacctcttaaaaatttcaaaagagaaagcaaaagcaaaaaaacccaaaagtaattattaatttcttcaaatatatagtaattcaaaagattgcatagagtcataggcctttttttcctgaatttaatttatagctccacctgctattcaatagtttgcaaataattttgaaaaagaatataactgacttaaaaaattctttatacttatttaattttttggattgcctaattaacgctttgtttgatatgaagttttagtgaaagaatgaaaaaaaagttcttcgttatagttataaaaaaatgagaaccaaatatcctaattaaaatagttataaaaaaacgtatgagaataaaaagtattctttatagtattaatatatatatccgaagttttatatcaaaataaatcaattaatgtccaaaaagtatgcaaatgaatttggtctagttttaaaatccatgcacatgcagtaagtaaagttgttggatgaccaaacacagttcaaattaatatatgcttgtaaatctaatttgcgagaataaaatttatgatcatcctatatttcattcaacaatttaatccaaatcccaaaatatcatacggaagaattggtggacaactggacatgtttgagttagacattgaattaattcaatcgccatctttgacagtgacacgcgttaacttgcaaatctgtgtgctcaacttgttgaagctcatccatttgaagaagcaaagtccaagtgcctaacttgagaaacctatataagtaggtcccaatccctctctatattattcacatcattaacacgtttcctttttatctctatctttcttcacatcttaaccttgttcttaccagatggctgcctcagttaaactcttatttttgtcctttctctcgttgttcatctctttctccatagctcaaacctctttcagaccaaaggcacttgttcttcctgtaaccaaagatgtttctgcctcagttcctcagtatgtcacacaaatcaaacaaagaaccccacttgtggcagtgaaactaactgttgatcttggtggtggctacttgtgggtgaattgtgaaaagggctatgtctcatccacctctagaccagcccgttgtggctctgctcagtgctcgcttttcgggttatatggttgcagtactgaggacaaaatttgtggccgttctccaagcaacactgtgactggtgtctccacatatggtgacattcatgcagatgttgttgctgtcaattccactgatggaaacaatcctactaaggtggtttctgtgcctaaattcctcttcatatgtggatcaaatgttgtccaaaaaggccttgctagtggtgtcacaggtatggctggtcttggcagaactaaagtttctcttccttctcaatttgcctcagctttcagctttcatagaaaatttgccatttgcttgagttcttctactatgacaaatggtgtaatgttctttggtgatggcccttacaattttggttatttgaactcggatctctccaaggttctaactttcacccctctcatttcaaaccctgttagcactgctccaagttatttccaaggggagccctcagtggaatactttattggggtgaaatctattaaagtctcagacaaaaatgtagcattgaacacaaccctgttgtctatcgatagaaatggcattggagggactaagattagtactgttaatccatatactgtcatggagaccacaatttacaaagctgtgtctgaggtctttgtaaaagaggtgggagcccctacagttgcacctgtggctccatttgggacttgctttgcaaccaaagacattgggtctacaagaatgggtccagctgttcctggcatagatctagtgttgcagaatgatgtggtgtggaccatcattggtgccaattcaatggtgtatgttaatgatgtaatttgcttgggttttgtggatgctggatcaagcccaagcgtggcccaagttggatttgtggcgggtggttctcatccaaggacttcaatcacaattggagcacatcaattggagaacaacttgctacaatttgatttggcaacctcaaggcttggcttccgctctatctttttcgatcacagcaactgtgccaactttaactttacctcttctgcttagaatttgatattattctactatattcaaaacttgtatcttaattaagaccaatgtgtgtagacgaggagatgaataagtgaggttatatttatgcataacctccatagtcttgttcccttttgtctacaaaataaagagcacatggaggacgtattcatcttacatcttgaattactccattatccgacatggttaccattgttataaaatgtgatgtgtgatagacgatgctcgtataaataagaggcttctctcccagtagataggtacacgtacggctcatcgtttatccttattccttaaccccaactgaattacgactagcatctctacctatggtaagaaaatagatacaaaaatcatagtttgttggttactgatcagtttttatagcccgaattccctcacccaaatcactttaaacaaatcttcattgacacgttatagataccacaccattgctttgcaccctatgtagttaattatttcaaccacatttactgggcctggaagaattaatttcttaacatgaatccaaaagaggtggcaatatatctttatcacatttgttttgaaacttatttcctactagccaactgttggatacaagttacaatgtgtaagtgtgtgatttgaagtgaggaaaatctcccgttggaagaatttgagggaaaaaatggtgattgataatcttcaatgggaaaaaagtacgaactagcttttggattatgtttagtccaatctagatcatagcacactcctagccacacaaaagtaaaaaataactcaatagattgagtatgaaatgttaagaaatctcacattgtctgtctcaattcttggtgtacaatttatatatttgttaagaaaattaaaaagccaattaattttaagctaaaatctaatatgatatcaaagtcaataactcatcttggttcttgcttattctagtagactcgtatatgtggagggagatgttaggaaggcctacatcattttttcgttactctagatttatgttaggtaggcctatatctctacctccttgattttgttctaaaggattctatgacagaataattttgttccgtatttcatggtttgctaaggtataatacaagagagttacaataaaatctcctaagattaagttatacataatgattctccaaataaaactcctaaaa

SEQ ID NO: 416 - DNA, 7843 bp, Glycine max; identical to SEQ ID NO: 293

SEQ ID NO: 417 - DNA, 7676 bp, Glycine max
gtataaaaaaatttgataaatttagatgaaacaaatttacctgatttttttttttttgcagcaagattcaagacactgttagcttgcttaagtagaattagcttcaccttgctgataaaaaaaaaaaaatagtttcaccttgtattttgctaatgtcactgccaattaattacatggcccccattgtttttatttgacactcttgcattcattcaatgagattttcgagcattacacttttcatttctcatttgctgtttttttttaagaattattttatgaaatttcaatctttaaaactttaatttggatgaagatagttttttataataataaaactgaataatagaatatccattatagttatatctggttgtttgaatgaatatcgtatttcatgttacaagaaagctaatgtgatatagttgcgatgattaaaattctaaaattcattaagaaaatgtgaatattatcttccagatttaaataattttaaaaaatgtctataccaaaaaaactaatgttaaaaaattcaaaagatattatgaaaattctattcttatttcacgagtgatttaaaaatatatgcaactcaaatattcaatttctattttgattatgtatattaaattattaattaatcaaaatgaacttcccaaagcttgcaaatagattttcaaaattttatttctaaaatatgtaacaaattgactttctaaaattcaaatttaaaaatacaaatagatttttaaacgtttgtttatgagatgtatcataaataaacttttgaaatatacaaataaattttcaaaagtttagttgaaaatatatgacaaataaacttttgaaaattttattttgagatatacaaatagatttgtagaatttaaattttgaaacaataaaactaaactcgtatatagtaacactattgaaataaaatttaaaatttaaaaataaaaataaataagaagatgcagaaagcaattagggcaacttaacacaaacgaggtacagccaaaatagaaaaaacatcatctctttcgggacttccgtcatcgttgactatactttggtaactctgcattctgcaataataagttaagacccacaaatttcttactcgctgtattgccgaagcatgtgatagttgagtgataaacacaactgtgaagaaaagtcaaattggaatgattctttcttatgcatattgataccttatttattcaatctcttgtgaatttgactaatagtagcatatgaagatgaagatagaagaacgtgttaacatgaatctggttctggtagtggcctggttggtccagttgaacattgtttatggctttgctcacattcatggttttggagagcaaccactctccaggattgccatccacaaggctgttgtttcactccacagtagcgcttccatcacagccaccccttctcttcttggcacaaaggtagcaaacataacataacatgttccttaaactttcctaatttaaccagaggagtgctaacaacacactcttttgtatacactcatacactcgttaaataagaagtaatacccaccaaattttgtgattttcaatatatatccgtcaatagtgaaacaggtgtttaaaagagtctgttagaggagaaattattacatggtctcagactaccaccagaatgctatagtctcgatcaatctccacgttatatgtaattgagtatttcaatttatgaaagagttaacaagacatgattaagtgttaggtagagattgaccggaactatagaaccatttaataatttttcgcgtcaaagagtttgttacactctatgttggaccatgccatagttcttacaaattaaataattggatttgttttttgcgaacggttagtcttgatagtttggttgaatgtaaaactttcaaccattgaattgtgctttgatgtgtatgatttcagggtgaggatacacaatgggtgacagtagatattgattaccctgacccatctgcagatgattgggttggagttttctctcctgcaaagttcaagtaataattacacatctctttctcaaaatggacatatattgaatattgcaaagttagaactcaactctgtacctagcagtaatcttcaataactgaaattttcaaatctagttgtttccaaagcctgcatctaattattgctaaaagaactaagtgaaagtcttttttataaatggcagtgcatcaacctgtccacctgtgaatgatccaaaagaagtgattccatacatatgctcagccccaattaaggtatgtgtcataaatctctgattgaattaaagggcaggttggattatttttctaagtgatgcattactcatgtaacttgtttgaaactttgtaccagtacaagtttatgaattactccaactcatactatacgaagacaggaaaagcttctttgaagttccagttgatcaatcaacgtgcagatttctcctttgcgctattttcaggcggactgttaaatgtgcttccagactctttctgctgttcttatatttagtatctccttctcatgctaactaaagcatgctcatgttaattgactctcaccttatatgtagcattgcagccactattttacactaatgcacttaatagggaaaccagcctatcttcattcagactttgtatataatttgtgggctgacttatggtcttctgattgaacactacagcctaagcttgtggcagtttccaatttcatatcatttgtcaatcctaaagtgcctctatatccaagacttgctcagggaaagtcttgggatgaagtaagtttatcttcatgctttgaggttcttgatatttttcccacccaagtaataagattcattacttctatttctcctataatggcttttcttcagcaatgcagttgctatatatgaagcatcaagttaacaagtatcctatatagaattaatagattttgagcacaaccctccaatgatgatagtgttctaacaagatatcattagattttataagtttgacacgataccattagattttattagtttgacattatgtcattattagattttataagtttgacttgatacttcggaactaggaattgatgctattttgttttaacactctgaaaccactattaggactacagaagtgattttaggatttttcggcctgtcttatgcagatgacagttacttggactagtggatatgacataaatgaagctacaccctttgttgagtggggtcctaagggcaaaacgcaagtgcaatctcctgctggaacattgacattcggtcgtaacagcatgtgtggtatggtttatttggtcataatgccatctcacaacaatgggtttttattgcatacagggtctgatccagttaatattttttagaaaacctgaatgttaaattgaatctctgcttagcattctgtaaattgtatgaaccctgactaggaatcatcataagcattaattactttaaaactgaataaactggaatcacttggtttatttacatcttccccttctataatgttccccataatgtgtcatcagaatatatcaaggagaacaaacttcatttcttgaaaattataccagagtagcatcttatgaaatggagggtgggagggtacaaaataacgaactgaaaatctaagttttagtagaagtagctttcagtaaccagaagtccataaccagtaatggctttcctgtttaaattgccatcaaatctcgttttcatcttttctatagaatttgcaacatttcattgcaagttattgcattcttttgcagctggaagtaagtaaatgttggaaactcttattgctgcttttttattcttttgaaaaattgggagtaggcttttctatagcagcataatgtggttcttttgttactctcccttgcaggttcacctgcacgaactgttggttggcgtgaccctggtttcatacacacaagttttctcaaaaacctttggccaaatttagtgtatgcattcaaatattcatttctgtttataacacaatgcggatctggcaaagtttgttctatattttttattaaaaatatttttcaggtatacatatcaattagggcatctattgtctaatggttcttatatttggagcaagaaatattcattcaagtcatcaccatatcctggacaggactcattgcaacgtgttatcatatttggtgacatggggaaggtaatgttaattttcaaaataaaattcatatgaagaaagaagaccctctgaaactgtctttgggaggaagaacctagtatgcaaaaactaagcatggtctgtaaaattcttattgtacacgttagactacatagctgcaaaagtacaatacaaaccgagcacaattgttgataatttggaataatagtcaggttaaaaatgatgaagtcgcaagatgactgttgagcatgattattgataaaagcacttacttttctttcattttgtttcaggccgaacgtgatggttcaaatgagtataatgcctatcaacctggttcacttaacaccactgaccagctcatcaaggatttagaaaatattgacattgttttccacataggagatattacttatgcaaatggatacctctcgcagtgggaccaattcacagctcaagtggaaccaattgcatcaacagtgccatatatgattgccaggtttgtcctattgtcctcaccttatgttgccatgtaaattagattcatgtattacatatatattgaacaataattgtctaataatcatgcagtggtaatcatgaacgtgattggcccaacacaggatccttttatagcactacagattcaggtggtgaatgcggagttttggcgcagaacatgttttttgttccagctgaaaacagagcaaacttttggtaaactcagattcatgaaaaatttaaatttgaccatttaattatatgtatgtttggattacatcaaatttgagggataatcttttttcccccatcaaaagatctgttaaaattatactgattacccatttcaaacacaatatgaactaatccaaaacaaacactcttaaatttgaagtttacaaatagttataagaatgatgctacacataaaacttcgtaccccattgcccagaggctcttcgctatgcgaaggtatgggggagggatgttgtacgcagccttacccttgcatatgcaaagaggctgtttccggattcgaacccatgaccaacaagtcaccaagacacaactttaccgctgcaccaggactcgccctcaagaatggtgctacacatatcaccacaaaattatttaaattttaaattcatgtttggcttttgttacaaaggtggtataaagttgagttaatttaaactcagtgagagtttttttataaaatgtcttgtgacataaaaatgttttagtattctaaatgaataattcctggttatatacaaaaatgtgtgtcaataattctaatgatatatagtaatatatttttcatatttgatatataataaacgagattctggatatccaggtatgcaatggattatggcatgtttcgcttctgcatagctgacactgaacatgattggagggaaggatctgaacaatacaaattcattgagcattgtcttgcaacagtagacagacagaaacaaccctggttgatttttgctgctcaccgtgtgcttggatattcctctgatttttggtatggtgtggagggttcatttgaagagccaatgggaagagagagtttgcagagactttggcagaaatataaagtagatattgcattttatggccatgtccataactacgaaaggacatgccccatttatcaggtaaggataacagccaaatatgtcatggctctatttaaattcaaaccaacttgcacagttggtaagcccatgatttgttttcctcattgtatgcatttcgtggtgtgctttttatccttatcaaaattattgaaatggtctatggatagttgcttcattcattttgtaaacttattattcctactgttacaatggtgagcttttaataacttccatacaaatgttaatttttttatgaacaaaatccatatacagaatcaatgtgtgaatgatgaaaggtctcactattccggtgttgtgaatggaacaattcatgttgttgctggaggagcaggaagccacttgtcaaatttcagccaagtaacccctaagtggagtctttacagagactacgattttgggtttgtcaagttgacagcattcagtcattcatctctcctctttgaatacaagaaaagcagtgatggaaaggtctacgattcttttaccatttcaagggattacaaagatgtcttagcctgtgtgcatgatagctgtgaagcaaccacttcagcaacttgaactgcttctttgtacacatgcacgttctagtagcttttcttttctggtctttcttttcttgaaaaaaaaaatgtagccataacaaatgttatggcttaaacatttataatttttaagtaccctcaagtaaaagttattagttacactttattcaaggagtaagcatggtctgtacaattcttattgttcatgttagacttatagactatatagctgcaatagtacaatatataccaaattaatacaatactaatatactattaaataataaataacagtgggtagatggattacatacctctggccagttaaagatacaacaaaagcattcatttgcttttagttacaacttatcagcataaacttttgggctgaattactcttcataccagtaatagctgatagatcataaacttgttatcgtgaatgcacatatagagctctgcctatatgatcattaacttattatctgatacaaagcaattttctatctactggaaattaacctaaaagactaccactaaagctaaagaaaactaacgaaaataagataaaactcagatatttcattcattgattgatgatgggtaaagttgagtatatttatatagttataagaatatcaatcaactggtaataattaatcaagtgccaacatcgtattattttaacacaagtaaaataaaaactgttttataaattacatatttaacttcatcttatgtaatccttggaccatttaatttcttatcattatcttacttgagagagaaaacaaaaaatatgagaatttttggttgactaaatgctctggctatatagtatatagagctcccgtttgtgtcaaatgaaggagttatgctggaaataccggtactgatgtggatacaaaagttttagcccacctaacccaagaagcaaactcatgaaagttacaagtgaagttttggaacaagtgagaccagatgtaaaatgtgtgtaaggacctaacaagagttggttcttattttgacgaatatcttgaatcctataaaaatgaaattttggagttggttctctgcaaaattagatagaatgtaggtttttcaagttggtgtttggataagctcgacaagagaatagttagaaaaatagttcaaatctgaaaaattaatttttaattgaaagttattaacttattgaattagaagagtcgtttggtatacact

SEQ ID NO: 418 - DNA, 7075 bp, Glycine max; identical to SEQ ID NO: 294

SEQ ID NO: 419 - DNA, 2850 bp, Glycine max; identical to SEQ ID NO: 350
  modified_base (2698)..(2838): a, c, t, g, unknown or other

SEQ ID NO: 420 - DNA, 3460 bp, Glycine max
gtaaggatttcaatttgatctacataaaactttaatctggtctataaatttattttatgagcttagtgataatttaatatttaaataaaaataaaaacatatatatatatatatatatatatatattaaatataacttatttatatgatataaatatatttttaagatttactaaaaaataaatttcaaaatttaatgtaatattcataatcttatttaaaaatatattttacaacaacatatttaattaagacataaatttattttcaataatcttaattataagctttaacttaactcttttataaatatcaacatttaacaagacaaacattttaataaattataataaatttaatataataataataatattaaccatgaataattatttatgattttttaaatagaaccatctaataaatctaaaagattttttgaatattcagattttttatctgtttaattaaatagactaaaatataaattcatttctagtcacctgacttattttcatctttaagttataattatgacttagaactcaagatttttatttaagaatgtataaaaataaattaattcgcgtcttagatgtataaaaataaaaaataatatattatattgtgaaaagaattaaaaaaatgtaaaaaaattgagacatataaaagataagatgaataaatagcagaagaaaaagtaaatacgttgcttacttaagccatgacatgcctcggggagtggggactctagtcaacatcaaatttaaacacggaaggtcccagagctttgaaagtaacgtgctcgtgtagaaagccaaggaaggaaaataataccaaagaaaaatcctaaaatattctttgatacggtagtatctaaagtagaacatttgattatacataaaagtcaatttttcataagccaatgtctagtactcatcactatatataagcgggccataaccttcttcttttgcactacaaatcagttttttacttgaattttcttcatccttctctgttctcctagaacttgattacttgaacattccctatgacagatgaggtggttcttctggatttctggccaagtccatttgggatgagggtcaggattgcacttgctgaaaagggtatcgaatatgagtacaaagaagaggacttgaggaacaagagtcctcttctcttacaaatgaacccggttcacaagaagattccggttctcatccacaatggcaaacccatttccgaatccctcattgctgttcagtacattgaggaggtttggaatgacagaaatcccttgttgccttcagacccttaccagagagctcaggctagattctgggctgattatgttgacattaaggtacccttcttctgttcttcaagctttttatgctttgattgttacttgtaattccctacaattggttttatattatgcttttagattatgatgatgtaatttggttgttttattcccatgttgcttcctattattaacttttcccttcttagttatttagatgtaatttggaatatgagagatgtttaatgaaaggaaaatggacccatttggataaaaaatagcaactttctttagacacctttttccccctagattctccacaacctgtctaagtggttcagctgttttccgtgtttgctagttttgttcttttgttgttttatttattggtaaatattcctcagcctactttagcaacatgttgcaaaaagtatttgattatctttttaagtgattgatcttatgtctaacaaaatgtatttgattgtctctatcatcccttctggtatcactatggtagatatgagtgtattggttattattagtggctccttttttctcattcttacattttatgatctaattgggtgttaattcttaatgtcgaacagatacatgatcttggaaagaagatttggacatcaaagggagaagaaaaagaagctgccaagaaggagttcatagaggcccttaaattgttggaggaacagctgggagataagacttattttggaggagacaatattggttttgtggatatagcacttgttccattctacacttggttcaaagtctatgagacttttggcagcctcaacattgagaatgagtgccccaggtttgttgcttgggccaagaggtgcctacagaaagagagtgttgcaaagtctcttcctgatcagcacaaggtctatgagttcgttgtggagataagaaagaagttagtcatcgagtaggtttcatgttggatcttaatagccatagtgaagtattggtcgttcttgacctttcaactaaataatatttgtgtaataaaaaggcatttggatgtgccaaacttcatgctttctgttggattgtgtaggttttaaaatttttctgatgtatctttcatgtgtttgttggttttgcaatagagtattttccgtattatcatatatttgcatagattaacatcgaattatttaaaaatgtgttaatacatgtgtcacaatagttttgtgtgtgtgagagaaaggtatattatctttaagaaaagtatatcctagatattctttagaggttcaagatcgatgaagctaagtcaatgactacctcatgcatccattaaccattttagaatctaacacaacttgcaaatcaacttcttaaaaaaatagagacataatcggatcccttatgtatttagctgttaataagtcaaatattttacacagaaaaataataaataaataaaagaaaataatcattttacagaattaatctcatatcatcattaatttatttatagattttgttgtctatcattaataagagattactagtaagtgaaagaaattaattaatgttacattaaaaaaattaaaatgacaattattttagaattatttatttttcttaaacaacaaatataatacgagaaagactaatatttatgacttctaaattattaattacatttcttaacttttgtgttagatttttttaatgtcaaacaaaatgtctgttttgcattcatatctatgttaaacggttatacatgactttttttatttttactttcaagtttgattgtttaaaaaagtatattaattaaaaaaaatgcatttctattaaataatgtgacgatagtaagttttttaaatatgtgacatgtcgtgattagctgagggtgtaaaattttttaatacttattttttactaataaaatccacataattaatggaacattaaggaaatataaaaaataagtattaaaaaatgagataaaaacaagataaaataaaaaaataagcatatttttaatagtaccgaaaaataagatgaataaataaatgccagtaaataatagatgaaacaaagtgcatggtttaatgtcacacaagtttaattcagaaaaccttcgtattccaggaaaatgcgaaggtga

SEQ ID NO: 421 - DNA, 4186 bp, Glycine max; identical to SEQ ID NO: 237

SEQ ID NO: 422 - DNA, 5853 bp, Glycine max; identical to SEQ ID NO: 305

SEQ ID NO: 423 - DNA, 6435 bp, Glycine max; identical to SEQ ID NO: 378

SEQ ID NO: 424 - DNA, 3634 bp, Glycine max
catgagtagactccttatttataattacaattatagattataacatgtcatcctttactgaaaattagtcttgtaattgatttagaagaataatatttaaggaaatactcaaaatcttaccacaaagtctaaaatctcaacgatagtcattaaaaaaaaaaatacagtatgtgaaacttctacgatgaggtaaaagcaaaaggataaatgaagaagaatgtgcaagaggagctgggctagagattacgcggtgaggtggggccttatgtcgtagaaggaaagctacaaaatcataaatcacgcgagatgatgatccaactcgtaacccacgtgtactcttcaatcactacaaaaagtcaaatcaacgcgccaacaacatggacgccctgggccccaaccgactagcccacacttccctccaaaaccactgtcgtaagcagtgacaaaatcacctcgtgtgggctcgcgacacgcgcgcaccacacttcatagcgccacacgtgtccaattacatatcacctaacttttttttctctcctaaaatcctgccattgaaataaaaggaaatgtaaaaggaatcagaacacgatacaaaatactagagaatgacggccattttattttaacctatttactaaattctaaaactgtcaccctacctaaccttggacttttaatttgaaaaatcaattacacaaataatagtaataagatgtacaattaaagacaaaaaatgaaacacttttttttttctttctttcttttcccacgctctactccacggggtatgcgcgtaacacgtacggtgagaaataaaaagaagataaaggatctaatattggtaatgtaataaaacttttaaaaagagtgaataataaaaatgaagccccattatcgcccatgtgtattctagaaactagtggctgatggtgccacgtgtcgcgcgcatcggctataaataaagggctctcccttatgtaataagtttcaagcgccgccaccatagttggtgttagtcttggtgtagtgtagctagggagggatatatatctgagtaagatggcatcagagcttgaattgcccccaggcttcagattccatccaacggacgaggagctggtgttgcactatctctgccgcaaatgcgcgtcgcagccaatcgccgttcccatcatcgccgaaatcgacctctacaaatacgacccctgggacttacccggtaacataatcattcattcattcattcattcttcgatttctgattcttaatttttatttattaattgttactgtgttactttacaggattggctacttatggagagaaagagtggtacttcttttcaccacgggaccggaaatacccaaacggttcgaggccgaaccgggcggctggcaccggttactggaaggcaaccggggcggataagcccattggtcagcccaaaccggttgggattaaaaaagctttggtgttttacgcagggaaagctcctaaaggggacaaaagcaattggatcatgcacgagtatcgtctcgcagacgtagatcgctccgttcgcaaaaagaacaccctaagggtatatacactccgtacttctttctagttcaagattattgctcgaaattacgactttgtccctacgctctcatcggctgaggataagtccaggattttggtggaaaccatgcaaaatgtatggtcgtaatatgttatcatgtgaaaactaccgcgcggaaccttcactagttgaagacttgccagcatgtggtctgggcttgggcccaagaaacttagccatcacattagatccaataaaaaaacaataattgatgcggaaagaaataaatcttctgccaatcgcaattatcactttccatttttagaaaactattccttctttatctctctcacctgcctccgattgcaatacttataataataaatgaaaatgaagaaataatcttacggtggttgtgatttttttttttttttgtcgcagttggatgattgggtgctttgccgtatttacaacaagaagggcacgatcgagaaactgcaaccaagcagcgatgttgctcatagccgaaatatcgaatcctcggagatcgaagacaggaagccggagattctgaaaagcggaggaggttgtcttccgccgcctgtgccggtgcctgcgccgccgcaagcgacggcgaagacggattacatgtacttcgacccgtcggattcaatcccgaagctgcacacggactcgagctgttcggagcaggtggtatcgccggaattcgcgagcgaggtgcaaagcgagcccaagtggaacgagtgggagaaaagcctcgaatttccatttaattacgtggatgccactctcaacaacagcttcatggcccaattccagggcaataatcagatgttgtcgccgctgcaggacatgttcatgtactggcccaacaagtccttttgagcacatcatgatggttttaaattacgatccgcaattgctcttaagattttctgactcaccatgcgaccacaatcgtaatttaaaaccatgtcacataaaatccacgcgcgccgcccattcgcatttgcacggtagcacgagactcaaggtccatgagtgtgcctgtgcgaccacacacatacgattattgatcaagttagcttagctaggccaaagtaagaaagaaagaaacattgaagctggaaacgcatgtgttggctccaccgtttgctttggtattttgctatgtgatgatgacgacgacgatccaacggtgcatgtgtgttgacctgttcctagtagtagtagtagcatgtgtacagctattgtagaatgtagataggtacactactacacgttgttgtcatgtgatcatagaaaggtctctcaccgtacaaaaaaaaaaaaaagtgatagaaggtctatttgatagaccttctaattaatatatgttgaattattattagcatgtgttacatctaatttattaggcgtgcctttgtcttttctcatttttttaggtctttttaaattgagtatcgtgatatcctactgtgtttactttttcatttcaatatcttttgttttttatgtactactataatataattaatataaaacaattttagttatttttactttcgtcattcacatatacttaatacactttctccttcttcaggttattgattttgacaactaaatttaatttttatacatgaataaaagaatcttagatgatgaagatggccattagttttacttcgataaatgtataaaatactcgcacttacgtaattttgcacgaattgcggagttcttattggactggaatgaaaacattttattaaagggaatcaaaatattcaatatgaccaagccataaagaaaatcagaagcctcttcaattcgtcacaatctgaattttaaaagcaaaatgtgttaatccatgtgccggaccggagtttgttttgatgaagtgacggtgacaattattattcatatttccatgttcgggaccattctattaatttaaaatccacagcgcatgtattatccttacctaccacagtagagcagtgacgttgtttgaaacttaaatcgaactcagaagatctcgaaactag

SEQ ID NO: 425 - DNA, 4086 bp, Glycine max
gtattatttactttattttattttgacttgaacattaaattgcaaatatctttatcctttgcagaacttatttggccatcattaaaagaatcagcacactctcccgaatctccaagatacgtaatgactttcttctaaactgtgcaaaaaagggtacttgagaaaattattttccaaatagatgtagctgtttaagagggatatttccatgacactactaattattaaaatttttgtaatattttttagtgacaaataaaaaaatgtaaggtttgaatgtagtcaaaattgtagaataaagtaaactactatgatgaaaaatgcattatttgctgcaaactcgcaatcacctttctacccatagtaaatttttgaggaagacaagaagacagtagctgccatttttgagagtcttaaaaataattcatagttagtaataatataacacgtaataataaccacaaaagaaacgtgtacgaaaagaaatctaaatgaattatcatttgattttcaagttgttaagctccacttttttttttgtttctttttgttgtaattacattttttttatgtataaaattcaaaatatgatactttagttaaagagattaaatttaataatactgaaatcaattaattgttgattacaaaactgcactctacaaaggagatttttatcccttccttgttcttgttcttgaaaggaaaataaaaccaaaaaagtctggtatacccggaaatttggtgtaccgccaattggggaaaccaaaccacgtgggtagcgcaaagcataaaaacgtgtctataagaggcggagccaccattacaagcgaaagtatccaaaaataaataaataaaattgtagcaatcacaacacaaccaaggctacgacttaaagcaaccgcaatcttttggccaaaagtcacacacacattactacacgcatctaaacactcctccgaactataatacagttttcttattttcattgttgaagctcacaagcaaaggctaaagtagattctattctcctcaagcaaaacctatagctcccccacactcctccagtacttgaataaaagctaaataaatattaaagcctttccttcatcaaggtactgtttgatctttgaatttcagtcctcaaagattggaacaacaggaacatgtgtactctcacaactgttcctgtgctcccttctaagcttaacaagccttcgctttctccgcaccacaattctctttttccctactgtggaagacgggtcgggaagaagaacaaagcaatggttcctgtatgtgtttcttttcttttcttctgagtttttttttttattttttatcaacatttattgttgttgtgtttgtctcatgggtttgtttggaattgatcaggttgcaaggttgttcgggccagccatatttgaagcctcaaaactgaaggttttgttcttaggagtggacgaaaataaacacccaggaaatctcccaaggacttatacgctaacccatagtgatataaccgctaagctcaccttggcaatctctcaaaccataaataattctcaggtatgtggttttgatctttcaattttgttttcctattctttcggaatcgttgttaagaaaaaaaattggtggaggagaggatgcaaattttgtcacaaaacagaggaaatcagggtatcttacattcttgcggtgtaagagaacattttttgggccaaaagggtaggaactcataatagatggtaacatgtgaatcatactgccgaccaaattaacatgttagatgggtgtttggttgaattcattgaatttattctggagaaatagtcttattttattttattttcagttgtttgaaaaaattaaaataaaacaaaaaagtgattattttgcataatctgatacgaaacacccactacgagagaggggaaataggatcggattgcccaacactccaatccggtagaaaatgaatctttttaagtccaaactgtgtgtttgacttatgatttgtaacctcccaacctaaaattggaaagtgtaaattgtgtttgtttaccaattatgatatattttagtgactcataataaagttgtatttgaacttgaatttgggtaaaatcatggtttagaagttgttccataaacccaaattgtgtttttttgggtttttgcaaaagacataattaaggagcgaagttgtcatatgatttaaggaatgaacatgggaattgaattgcagctgcaggggtggtacaacagatttcaaagggacgaagtggtggcacagtggaaaaaggtgaagggaaggatgtctctgcacgttcactgccacattagtggaggtcattttctcttggatatattagcaaggttaagatacttcatcttctgcaaggagctaccagtggtaagctacttttgcttgcaagcatcaaattatggtttgtttcactgactggtcaatgaatgaaaaattaaacgcaacatgtttcctattgcgtgtgtaaattaggtgttgaaggccgtcgttcacggcgatgaaaacctattcaacagctacccagaattgcaagatgccttggtttgggtctactttcactcaaacattccagaattcaacaaggtggaatgttggggcccactgaaggaagcgtcagcacccacaggtggggtccaggaggaggggttggcaattccacagccatgccaagaagaatgccaatgttgctttccaccgcttacgttgagccctattcagtggtctaaacaagttcccagccgccattacgaaccttgtgatgggattgggacccaacaaaatctataaacagccaaactactacaattcacagttacggggatgctgccaaattggcaaattccctgtatacaaattaaatattcgaaacccatttcaatgtaaataaggaagctcgtatttgcaatttttttttttttatatatttttctttactttctttgttatgatttttctttcgtaagaaattaaattagttcatgtataatatgtctgtatgcatggttatttcaaagaattaaacagatttttgtaaggagtggaatttcgtggttgtaatattgttttctcagtttcgttgtttcttttgcgttataatttttagagattttaagtcgagaaaacttggttgaaaaaggacaacgacaaatgttagacacgctaagtttaaaatatttaaatttaagattgagatgtttgaattaagatgctattctgccgtggaagacaacattcaaaaatgctggtgatgatagtaaccaacaaggaagaaaaggccaaaacaatgtacaataacgttattttgcaagttattttttttcctacatatttatctacctaaatgaaatattatatttttttccggtttaaaaatataaaatcagttatcttgaataaaagaaaaagaaattgaactaaggggtgtgttcttaagactataaagtagaaacacacaaaagcccctgcctcgcattcagagatgagatgagatagtctcattattagttcctgacttgaccaagaaatgagtgcatggattgacttcatcaagaacacggctaatgtaaaattgtaaggcgagtgatatatatatatatatatatatatatatatatatatatatatatatatatatataacattgtagatgactgaaatatttttctatcaagtaaggacgtttagaaaaacttatataacacaattatattttattttataattaaacagttaagttgaagtttaaagctatttaattatcgtcataaaataatttataaggttttttttacttaggtttatgatgaaacttatgagaataaatttattgaattaaacaattttgacataagctctcaagttccatttttagaataaataagttcttattaaaatagtatttgttaagttgtttaattaggaacaaatttatataatcagccttgacaatatgctaattaaagaaaataagaaaatatgtatgtgtttagttatgattagttttttttaacaaaaaatgacagctttctttctca

SEQ ID NO: 426 - DNA, 3455 bp, Glycine max
tcaagtagaatttggagcattccaaaaacttggagatccaactacaaaaaaacaggtagtctaacattcttttgttctttttcgactttttttatgattttaaatttcacatagagaactagataaatctttatttcaatcattgcagttactctttttattttatttgttgggaaatgatccccaataaacaggtatgaaagctataattgtaaaccacaatcaaatctatggaagcattggtttatacattcctcttagtctcgactttaggaattatttttttcgctatcttttttagagaaccccctaaagttccgacgaaaaaaggttaaataattttttattatcttaattgaagtaatgagcccccaatatggagggctcattacttcaactagtccccatgttcttcaaatggatctcttagttgttgcgagggttgcccaaaggcaatatataaggcatacccagtaaaacttacaagtaaaccagatatagagatggcaattagggttgctgtttccattattagaattctaaagtttcaagatcacaatagatctataggataagatccttatatttacagcgaaatggtatacaaagtcaacagatctaaatgaataaaaaatagtatttatggctacgcaaaccgttgaggataattctagatctggtccaagacgaactgttgtaggggatttattgaaaccattaaattcagaatatggtaaagtagctccggggtggggaactactcctttgatgggtgttgcaatggctctatttgcgatatttctatctattattttggagatttataattcgtccattttactcgacggaatttctatgaattagattcacaagaatcgggtaattagtttttcaatagaaaggaaagttaagcattttggtttcttattgtttgttagtctatttcatttggatttggtagtttgatcgtggaatttctttgtttctgtatttccggaatatgagtgtgcggcttgttttaatggatcctattgaaagtacagaacataaaatggatctgtcatcttgatagagatggttttatcccgtcagatatttcttctagtatctggagcacggaatatagaaaatggattctaaaaatattagaactatgattcatactaaatatttagacctcgcaaccggacttaaaaaacttttcaaagagttttaaaaataaattgaataatttgcattcttttaagtttccggagcttatctttattttgatcaaaggacaaacgtttcctttaatttttttcattatatctattcattgaataagtgatgatccaacagttcttactcagggaatttttggacttcgatttaaggtttttttgaatcatcgtggttatagtatgaatctgatgtttttttaattgattcatagggtcctaacaagagaattcctatcaataataaaaattcaataataataaagaagacaacagtaaaatcatattatacacaataaaaaaatgaagtaaatagtagaatattcaagaggccttaaaagatcaagataaagacgaaggagccgacttgatattttagcattataaccaaaaagaatagctttcggatctctattttttattatcgtcaaagaaaattagaatcataggattaaataaagaaatttcaaactttctattacacatatctgttttcgttacaagcagtatttgggtatttttgtttgagccgtacgagatgaaattctcatatacggttctcagggggggtccgttggtttacctatctcaataaagtctatgattggttcgaagaacgtcttgaaattcaggcgattgccgatgatataaccagtaaatatgttccgcctcatgtgaatatattttattgtttaggaggaattacacttacttgttttttagtccaagtagcaacgggatttgctatgactttttattatcgtccgaccgttactgaagcttttgcttctgttcaatatataatgactgaagctaactttggttggttaatccgatccgttcatcgatggtcggcaagtatgatggtcttaatgatgatcctacacgtatttcgtgtgtatctcacaggcggttttaaaaaacctcgcgaattaacttgggttacgggtgtagttttggctgtattgactgcatcttttggtgtaaccggttattccttaccttgggatcaaattggttattgggcagtcaaaattgtaacaggcgtacccgacgctattcctgtaataggatcgtctttggtagagttattacgcggaagttccagtgtgggacaatctaccttaactcgtttttatagtttgcatacttttgtattacctcttcttactgctgtatttatgttaatgcacttttcaatgatacgtaagcaaggcatttctggtcctttatagtgaatatggatcatagatatttgtaatcacaatcattttttattttggggaggaatttatttcattgctacaaatatggattatttaaaagaataagacatgtatttggatatttcccttcaacttaacaaaaattgaatttttttccatacacgcacgaatagttgaagggaactctccgaagaaaaaatggattatgggagtgtgtgacttgaactatttattgggccacgcagatatctgactttatcttatctgccacatttgaatttataattaaatgtgtcttttttccaaccaccaagtaaggctcttacagagagggtaggctggttttacttgaaaagaatcttttctatgatcagactcgattatattctacatgaacaggctccgtaagatccagtaaaataagtaatgtagtatagtctgaattatatcatatgtatttcagtaaacttaatagtatgacaacgcattcatttcctatgcattgattcgatttctgatactatcggagtgaaaaaagtagatctaaagaaaaacgcgggttggattatattagtaacaagtaaattctttgtacgtaaaaagttccaagattttgttggacagaataacaattgcaaagtttgagatcacccagaaagcattatcaattttaaaagcctactcgggtattgagcgtttatcaaagtttacttaataagaacttaatttttttttttttcaataaagaattgtttgtaacttcggaaaaagagaatctagtttattttcttacatagaatcctcatatatgtgtgaataacacatacattttttctatagatacattcgaaatctttgattagtgctcgagccggatgatgaaaaattatcatatccggttctttcggaggatggatctataagaattcacctatcccaataacaaaaaaacctgacttgaatgatcctgtattaagagctaaattggctaagggaatgggtcataatt

SEQ ID NO: 427 - DNA, 3710 bp, Glycine max
catagtaacgagagttattaatatcttttttttaacttggattttagtttctttttaattatttttgagtaatcaatatatattttctaggatcatcccatcttatttgatttcaagactatttaattactttgaaagttacgtggtatatctgcacatgaatcacctaactgctgaatcttcaaacaatatttaatgtcatgaattaatattaaaaaaaattgaatctacatttcttacaaacacaagacacctgcatggtcgaggaggagaccagggcaacttcatcaaggcgagaacgatgctttaccaaggtctgcctgatccaagagaggccgagacttgggtttatttcaaacacttatgtggacaaaacacctcaatttgacaaatgttatcttcgaatttgattataaagtagtggtagatggagttaaaaatgttattagagactccctagattttcactgtattatatataagtgtagagtccttctttcttctattctaaactcagtagtgagtttcaataggagactaattagtggaaaatagtcaagttctacatcaactgtctcaatttttggagtgtaacttatatacctgtgggacaatttcacttaataccaattagttttaagatgaaatttaatactaacaaatcatgttgctcatgtcttcttggcagcaggatatcatgctagcatccaaattttttattatattctaaattgtatatttccatacaatatgaatgacgtgaagtaattatgtttcctttcaaaaaaaaaaaaaagacatctgcatggtagcataacagaaaccagtccaggttcaatgcacataaatcaaaatatttctttattgtacgtgaacggaatcttcaacttcaaaattgtatttgcaccacacaaaactttctcttgttccttaaataagagaacaacccaaaacctttccaaaatacacgtgcagcaaattgcttacccaatcaccagccatgggagaggttgacccagctttcattcaagaaccacaacacaggccaaatctctccaccattcaagcagaaggaattcccataattgatctctctccaataaccaaccacacagtttcagacccttctgcaattgaaagcttggtgaaggagataggacgtgcatgccaggagtggggcttcttccaagtaacaaaccatggagtgccactcactctaaggcaaaacattgagaaagcctcaaaactgttctttgctcagactctggaggagaagagaaaggttagcagaaatgagagctctccaatgggttattatgacacagaacacaccaagaacgtcagggactggaaagaagtctttgattttctagccaaagaccccactttcattcctctcacttctgatgaacatgatgatcgagtcaatcaatggactaatcaatcacctcaataccctccactcttcaggtaattcatctgtactttgcaaggttttaaataccggtcgtgttacgattttgtcgcgtttgatgatatcacggaaaatcacaaacaaatgtggttgaagcggtcacattgtggtcacatacagttaaaaaactttgatgttgtggcccaaatcacggtttggtttaactgtctatgactgcaatgtgaccaattgcaattgagaccgcatcaactgcatttgtccgcgatttttcacgatatcaacaaacacgaagaaaccgcaatgtgactgcaactaatatttaaaacctttaaaacaaaagtggattgtgttcaaaactaattgttcagcccacagtcatgacagctggacagtttttataattctattgatgatgtgaatacgagcagggttgtaacacaagagtatattcaggagatggaaaagctgtcctttaagctgttggagctgatagctttgagcttaggccttgaagcaaagaggtttgaggaatttttcatcaaagatcaaactagctttattcgactcaaccactatcctccatgcccttaccctgaccttgctcttggcgtcggtcgacacaaggaccccggtgccttgaccattcttgcacaggacgaagttggaggacttgaagtgagacgtaaacgggatcaagagtggattagagtgaaaccaaccccaaatgcttatattatcaacattggtgatactgttcaggtgccagtgcaataccatattgaaaactgaaaattttaaatttcacttacacactagttgtaacacactctatcattggtttaaattaattgaaaactataaaatcatgagagagacattaaataagatgtgagaacaacaactttcttgtaatttcccataaatttaaaccaatgatagagtgtgttagagagtgtgttgctagcatttctctaaggaagaaaaactttcacttgaggattggggttgcttgtgcaggtttggagcaatgatgcatatgagagtgtggatcacagagtggtggtcaactctgagaaggaaaggctttccattccgttcttcttcttccctgcacacgacaccaaagtaaagcctttggaggagctgataaatgagcaaaacccttcaaaatataggccatacaattggggcaagtttcttgtccacagagggaacagcaatttcaagaagcaaaatgaggagaacattcaaattcatcattacaagatagcttaaagggtagtatattagcaggattccagcgccatatagcttatgcatataaattgggtatgatatcatgatatgtagcagcgttgatccaagacaacgtttctgatataaatgactgagtcaaatttacttcctagtgtgccttaatgtatgcaagtatcaccgaataaaacaactaaattattaccatttatcatgtttgtctcaaaaattgaaattgcattggactttaaattcacagttaacattttttgtgccttgattttcgttttcttataaattagtctttcattataagatttactattgaagaactcttaacatcgtttgaacctttacatcgtttgaacctttacatgcttctctccttttacttttctttggccaactacctaaaatgtcagccttatacccaccctgcttgcaggatcaacagaaaggcactggacgaatatctcttggtaagttttgaaatacactttatttgaataataataaaaatcatttttgtatgctatacatgtgaaagcatgctagcaaggtaatccaattaagtgacaatgcttcattcagcttgccgaaatcgacacccctttttttctaatttgatgctcaaccctcaccccttatcaatctcttttgaaatctaccaatgtagcaaaacccttccaaatagcaatttgaagaaacaaaatgtgaagaaccttgaaatttatcaatataagctagctagtataattggggtataatgtgttaaagcagattgatccaaatacaatgtttctgatatgtgacagcaattgaatttgcagctaaaagttaccagtgtgcattatgtatagaagtatcaactgaatttaccatttaccatgttcattgttggcttatccaaaaaaacaattatgttcattgcaaaacctgaaattacattgctctttaaattttctgttttaacatttttagccccttgagtatctttcggttagatttatagggattttaa

SEQ ID NO: 428 - DNA, 7383 bp, Glycine max
caactaaattatatttcctttgctaaatagatatatctctgccatggttcacatcatctcttgtttgagtaaatacccatgatagtaataactttattgtcagacgaattcgtgaattaaatcacgattttaccaaaaaggaaaaaaaaatgacggacaaagtaaaaacaaaacaaaggggtttggattttggggaccagggcaattgtgttcatgaagtaactttactagtaaaagtgtaaaacttgtctatgaaaacttaattttcaatcctgtattcaacttatgactgataacatgaaaacttatgtttggattaaagattgaaaagtctaaaaatatttttactctgaaagcaataatttttctttctttctacgtgtattgaaattcgttactgtacattggaatttgacaaactacttttcaaactttttttttttttatagaaatactttgtaaactttaattcaaataaaccctaacttggacaaataaaatgatttgcattattagcacttatgtgtgcatttgttttgctattaacatatgctaatttaagtaatagagattactcttacctatgtgatcttaaatttgattgcggaatttacatgtataaaaaaatacacaaatttaaataaaataattttagtttgaataattctcataaaattaactcaaagaacatttattgtttagtattccgcgcatcgctagttaccataatcctcgtacgtacccaagaagaagaaaaaatcttattacagcacttgctattttctaaggttgttgtcatgattgattcattgatgaaagtaaatcatacatgtcttaaacaaagaaaaaaataatttcagtttgattgcattgatatgcaacacaagtccatgtcatcattatcttttacagagtcacaaggtacaactgttgttgttacggatcaggtttttggatttattcaggatatttttcatgatgttgtggtaaaacaattgatacattttgatgaagtcgtggaagctgctggtagcccctagtgtagtctagtgtgacatgttcactgttcttatcctttcgtctctgttgatcatacgtgtctgtctcccactatcatcagtgcacgtaccttgtgatcttcccacacacacgtgatcacacgctaatcagatccttaccctccccaacacacttccatgattcattcactgttgcctccttttttgcctatatagttgctttaggctaaatcttgatttgatttggtgcttgattgtctaattatcttcggctaaactttgatagggttgtgaatattaaatatctagccggtgggtttttggtatcttactaattatattatctagttcaagtttgaggtgtgtttgaggctggatttgaagaactttccagttagttatctcttatcttgaagaatcattttattatataattatattgaatattccagctcaagtggtttgtggatattgttctttgattttatatatgcttttttgcaaccttattattattcttcagtcgcttttctttgctcgattggaaaattttcctcttttcttttatgtgattttaactggcggtctttaaattggtgactgagacatgtggggatgggttctctctgagtaggattttagattgatacctcacacaaagcaaagtggcatcaagttggactttcattataagctacttgtttgttggtcgactttggtaatgatttgaggctcttatcccatgttgctatagatatctttatatttttttcccccaaaaatccaagatccaacctttgcttctaatatctgagatatcaatcttcatatatttgcttttggtaaggatattgattaggagaactcggtgttttttgttttattgggtgtgtcagaaacttgttttaaggagaagctactgagagagctgttatatgaggttcgaagctttggctatgccatgaaaattttgaattgtacaatatgggtagcaacaggactattgtttggtttagaagggaccttagaattgaggacaatcctgcattaactgctgctgcaaaggagggttctgtactccctgtgtatgtatggtgccctaaagaggaaggacaattttatcctggaagagtgtcaaggtggtggctgaagcagtctcttgctcacttggatcaatcactgaagtctcttggatccagacttgtgctcatcaaaacccacagtactgctgtggctctcgtggaatgcgtaaaggccattcaagcaaccaaagtagtgtttaaccatctgtatggtaagtgtagctggtgtagatttagccttctgttttaaatgttttatccaattttgaacctatcatatatttagtgtcatttaatgttttggatctccaaaaagttgaagaagcaagtaggctttttctattgataatttggaggaggtttagggctgagcttcaaggtagggtactccttgaagacaatcctcaaaactgaacatattggtctgttcactaagtgacaattacttgaggcgttttctcatccttactatttttgttccgtgtttcagtttggtattatgttactgcaaaatgaagggtggatgattgtcaaagctagagaattctaaaaaacaatacactgattctttaaatgccataaaaaacttcgtaccccattgcccagaggctcttcgctatgcgaaggtatgggagagggatgttgtacgcagccttacccttgcatatgcaaagaggctgtttccggattcgaacccatgaccaacaagtcaccaaggcacaactttaccgctgcaccagggctcgccctcgattctttaaatgccataatacattaaaattcatttaaatctgtatgcttgtttctcaaatcaattatttagttttttagatggccactttaaccggttgagacatgagaattaactggcacttgtaggattgctttataacgaacaaaataacttccacatatattcttcgcagttcaatgctagttagctgatccatatttcttaccctaattattctaccagatccagtttcacttgtccgtgatcacaacatcaaagaaaagctagtggaacaaggcatatctgttcaaagctacaatggagatctgttgtatgagccatgggaagtaaatagtgagagtggacgtgcttttactaccttcaatgctttttggaagaaatgcttgcacatgcaaatggatattgtttcagttgttcctccatggcaattaattccagctgaaggtatgatatgactatatgcataatgcatgttacttcgatttgattgtttctcgataatatcattgttgatacaaggttattgctagaggttatgaactaggaaggaggtctagttcttagataattctattatggaaactagcagtaatctgatcaacttcaacttctctttttatatcaacctgtctatataccgaatggtatacatatatggacacaaaaaacatgtcagaaattgtttctctttttggacgacaggaaaaattgaggaatgttcattggaggaacttggtcttgaaaatgaatcagaaaaaccaagtaatgcattgctaggacgggcatggtcaccgggttggagaaatgctgacaaggctttaagagaatttgtggagcttcatctacttcactactccaagaaaaggctgaaggttggtggagagtccacctcactcttgtccccatatcttcattttggagaattaagtgcaaggaaagtttttcaagtgacttgtatgaagcaaatattatggacaaatgaaggaaacagtgctggtgaagagagtgcaaatcttttcctcagggccattggacttagggagtactcacgctatctttgtttcaactttcccttcacccatgagagagcacttctggggcacttaaagttttttccttggaatcctgatcctgatatctttaagacttggagacaaggtaggactggctttcctttggttgatgcaggaatgagagaactttgggcaacaggatggatacacaacagaataagagtaatagtttccagttttgctgtgaaaatgttgcttctaccctggaaatggggaatgaaatatttctgggacacacttctggatgcagaccttgaaagtgatatcttgggttggcaatatatctcaggaggcttaccagatggccatgagcttgagcgcttggacaatcctgaggtttgtcatgttttccttcattcaaaggatttacagtttgcttggtatcactcagatgtgattattttatattccatactttactttaatttctatgcatttaaaagtttgtttaatcaacataacatgtataacatatcactgcctgttatagcatttgactttactgcagcaaaaaaatcttttgtttccttaccttgcctctgtcctcatgtgccattttttgagatctaaggatgttgattatactaaacgttatagtaacactgcataaaactagaagatattagttttgtgttgtgaagcaaaaactgacacaatctgagttaccctgctgcctgtagaaaaattagagacttactttttcatattttcttcaattccttttatacctgctgaaatttatctcttcatatttcttttacaagttttaaaaggaataatgctccaacaaccaaagtatatcttgtttctatctaacatagataatttgaattttgagattttttgtttctgtctaaccaaagtatatctgtttcatgtattagtgtagggcatgccaatatatttgtattttgagattttattttgattttttctgattgaatatccatggctctcttagttctatttatccattaaaacaactctgtagattagtatttctaagaagaactatagtagttgaaagagatcttttgccaatatgcatatttaactgaggctgttattacttgttcctcccctcaaaaagaaaagaaaagaaaagaaaaagaacctattagcctccttcattgactattacatccataaggagtaagttctaccctttcagagaatagaaaaataatcaaaataaaagttagcagtctcacatctctaattttggtgacagattcaaggggctaaatttgatccagaaggtgaatatgtgaggcaatggctacctgagttggcaagaatgccaactgagtggatccatcatccttgggatgcaccacttactgtgcttcgagcagcaggagttgagctgggccagaattacccaaagccaatcattgatatagatttggccagagaaagactcactgaagctatattcaagatgtgggaatctgaagcagcagcaaaagctgctggctctgaaccaagggatgaagttgttgtagacaactctcacactgttgaaaatttggacactcaaaaagttgtcgtcctgggaaaggctccatgtgctactatttcagctaatgatcaaaaggtgcctgctcttcaggattccaagaatgaaccgcctacgcggaagaggccaaagcacatgatagaggaggggcagaaccaggatcactctcaaaatcataacaaagatactggcttgtcaagcattgaccaagacatttgctccacagctgattcttcatcatgtaagaagcagtgtgccagtacaagctcatattcattttcagttccacagcagtgttcctcatcttctaatctgaagtggccatggcaagagaagattgatatggagcagagttcaagcaaagatggtaagtacattcttacatttccaagggatttatgaaaatgcattctcaaacaagaaatgcattgctgatctaagaaaatttcataattacattcattaatagcttaattattaaggaagctacaactgcaatgaaactatttatctctggaaaggaaattacaatttgatggaatagttctaacttctaagaattggataggctagcagagatacagtaacaaattaacaatttagctgaagagtaaaagaagagtgaggaaccaattctctttcttctttgttctgttgctcatacgtaacataggtgacccgaatgcagttttgagtaaattaggttccttccatcaaattcatagccttatgccacattagcagtttatcccatgattcttaggttttacaattatgttggtcctgcttttggaactcagcatgttcattagtgcatagtagcttatagttctcttttataattattatcattattttacactcaattttttataacttttttttggctttggcgtgctactgatagataagaatttcaatgcaggagctatgtgaggttgatgttgttcttgttgacaaaaccagtagcagctgcattgttcatggaaggaaaatggtgccatatttaagttttgcagtttgtttatagcctatgctatcaatcagttgtgtaataggttatgaaatcctgcaagaggaacacggattacaacaatagtgagcattgtatattatgaacttgtgctgatgggctgttccatacacattctgacaatcccgtaattacaaaccatataaccaaatactctacacattatattactctaaaatggcttgcattttatccttcttactccagcatttttttttgcccaattacacaactttgttcaaaatgtttaaaccataactgtaaactagtacagcctttcttaacttggttaggatttaattctgtcatgtgatgttgtgtgattaaaagttttagaatttggcactcttgataaatttcattttttaaaaaggttcagcagcttcttttgggtaggtaatacaaatctatagcaaggaaaaaacctcatgtatatgctttccgatcaaaaacatctccatactcaaaattataatgtttttttttatcggcaaatattagattgttagaatgatagttttattactagagagaattgaacttagaacttttttctctttcttttttccttaatcatccaaccatcttatatctcctgtaacaatggtaatgatgtgttatagcggtttgttctttgattttattaacttacattaaggaagaacaaaaccaagaaagtaattcaagatataagattattacgtcttttcatctccatcaaacaagaggaaataaatctatggaggctatgcataaatataatatcacttattcatcaccttgtctacacacatggatcttaattaaaatgcaaattttgattatagtagaataatcaaattctaagcagaagaggtaaagttaaagttggcacagttggcgtgctccaagaagagggagcgg

SEQ ID NO: 429 - DNA, 3017 bp, Glycine max
ataggtcataagtttaatcgctaactcgaccaatatcgtactggtcaattacaccaagtttaatgtcctgtcaatccgatagataactcgatctggtctaccatcgttgtcaccaccattattttaccgacatcaccaccattgtcattgttgtcacttccatcattctatctttatatcgtcattattttacaatagagcgagataaaataaaataattaatttattttatttatcttcaatttataatatttttataaaaattaaaaacaaaaaataaatcaaaattcaaaacgaaaactaatttaaattttttaaaataaaaaaaaaaacaaaaaacaaaaagccacctcaaaagagcctaaaaacttgtgtaatatcagtagttaatttccaataagaggggataaagattagtttaaaaataaaaaatttataccacttttagtcttatactcttacacttaacaatattggtttttaaaaaaaaattatactaccacattgaacaatatttaaacaaacgaaatattttccttgatacaaatgcaaagcacaaaatcctgattagaatcccatgtaccatattaggtggcattgtattaatgagtttagctgtatgagtttagaaataattttcgggaagcagcataggaactaaggaagtaattaattaacttatccgagcaataaacagcataaccctagtctcgaaacaaaaccgaagaaaatcaacaaaagcaagcaagcagcgattccaaattccgaaaccaatactagtattatgcacctgtggagtgtggtactctctttattcgatgcacaccaatcccttccttatttttctctctcctgtttatataaattgcatgttacaccgccctattccaccattgacagagatgacatcgaaaccccttcaccagagcctaatcaacatcaacactgaaggaacgaccttcccaaccatctttcccctctaactgggcccaaccaaccaatggcctctctccttcctcaaccccaagaaaccaaacccaccgccaccaccgccacagaaaccactcccagcgaaacatctatcactgctagtgccaacaaaagcagcagcagcaacaacaacaatagtagtagcaatagtcgtaagtgcaaaggtaaaggtggccccgacaacaacaaatttaggtaccgcggcgtcagacaacgaagctggggcaaatgggtcgccgagatccgcgagccacgtaagcgtacgcgcaagtggctcggaacatttgccaccgccgaggacgccgccagagcttacgaccgcgccgccatcatcctctacggttcgagagcacagctcaacctacaaccctccggttcctcttctcaatcttcctcttctcgctcctcttcctcttccactcaaaccctaagacccttgcttcctcgcccttctggttttactttcaattttcccttcaactccgcccccgccaccaccgtgccttacccttataacaatagtcacaattacacttacaccccacccgtgttgtaccctattgataatagtaagaatcacaatattaatacagtgcaagttcatcatccacatcactatcgttgtcctgaggaagtggtgcaagtgccacattcggaatctgatttggggggtttaggtgggaataataatattgttgttgatggttctattagatcaacctcgtaccagcggcatggttttctggataatattaataataacaataaccatgtgcatgtgcaagtgcaacatggggttttttcgaatcaacagcagcaacatcagaatagcgtggtggagggagtgaattcctccgtcgtgggttcggtttcgtcttccatggatgcttcttcggtggatccggatctggcgttggtggggacaatggggcttggatcttcttcgcctttttggtccatggcgaacgaggatgattacactggtagtttgtgggattataatgatcctttcttctttgatctttagagaaatttgagtataaaattgcttggttaattagcaattataacatgtttattgttcaagttaattatcgttcgattggtttgaacttagtattagtacatcgtgatggaagaggatcacagatagattaatggatactgttgtgaataaagtgttgggtagactacgacgctgctgaaagattagtgcttgttagtattaattgttaattgtggataatgagcttgatagaattaaataaaaatatttttgatggctgagatttagttcagttgaaattaatactaaacgcagtgcaaatacatttttctgctggtgattgagaagcaatcagcaatggagttatatatcttgccattagtttcgtccgattattcggtaagcccagctctctattatttggacttcaatattgtatgattaatttatatcctttgatatgtgatgtttaaattaatatatatgtagtcattctttcccgggatcaaatctttctaaggttttcatggaattttacctgtgaaaccagaaattgagaaattgaatgattgaaagaaaaaagaaaaagaaaagctgtattattattattttcttaataaacgttgttcttactttgtctatataattttttcttctttttatttgtctaattgttgatgcaaacattcttcaatcttcacagttatgttcttgttggcatggcccaatattgatttggggaagtatgaaaataatttattacaaagtctaattttttttataaacctaatatactttcttagaattttgttattataaattatttatagtttattttaataaattttatttatcatggattttaaattttatattacaaattttagattttgtatataaagttacttagtgggttaaataatctacaagaatatggagatgaaaactgagaagtatggtttttataattgtgtattaaaatttttatttcctcatcatatcggtatatgataatattaat

SEQ ID NO: 430 - DNA, 5106 bp, Glycine max; identical to SEQ ID NO: 341

SEQ ID NO: 431 - DNA, 7078 bp, Glycine max
tattacagtgcttgctatttactaacgttgttgccatgattgattgattcactgatcaaagtaaatcatacatgtcttaaacaaaagaaaaaataatttcagtttgattgctctgatatgcaacacaaattcatgtcattattatcttttacaaagtcacaaggtacaactgttgttgttacgcccatcaggtttttggatttattgaggatatttttatgatgttgtggtaaaaatttggtccattttgatgaagttgtggaagctgctggtagcccctagtcagtgtgacatgttcaatgttcttatcctttcgtctctgttaatcatgcgtgtctgtctcccactatcatcagtgcacgtaccttgtgatcttccacacacacgtgatcacacgccaatcattctctcaagcctccccaacacacttccatgattcattcactgttgcctccttttttgcctatatagcttaaggctggatctttacttgatttggtgcttgattgtctaattatcttcagctaaacttcgatggggttgtgaatattaaaatatctagccggtgggtgtttcacatctcacttatattatagtccgagtttgaggtgtgtttttttaggctagatttgaagaactttccagttagttatctcttattttcaaggattattttattatataacatattgagtggtttgtggatattgttctttaattttatatatacttctttgcaaccttattattcttcagtcgcttttgtttgctcgattgaaaaatttcctctttttctttgtgattttaactggtggtctttaaattggtgagtgagacatgtggggatgggttctctctgagtaggatttaggttgatacctcacataaaagcaaagtggcatccaagttggacttcatgataagctacttgtttgttggtcgactttggtagcgatttgaggctcttatacccccatgctgctatagatatctttttattttccccaaaaatccagatccaatctttgcatctaatatctgggatatcaatcttcatatattttcttttgataaggatcttgattaggagagctcggtgtttttttttattattattattgggggcgtgagaaacttttttttggaaggcaagggtgtgtgagaaacttgttttaagaagaagctactgagagctgttatatgaggttcaaagctttggctatgccatgaaaattttgaattatacaatatgggtagcaacaggactattgtttggtttagaagggaccttagaattgaggacaatcctgcattagctgctgctgcaaaggagggttctgtactccctgtgtatatatggtgccctaaagaggaaggacagttttatccaggaagagtgtcaaggtggtggctgaagcagtctcttgctcacttggatcaatcactgaagtctcttggatccagacttgtgctcatcaaaacccacagtactgtcacggctctcgtggagtgcgtaaaggccattcaagcaacaaaagtagtgtttaaccatctgtatggtaagtgtagctggtgtagatttaaccttctgttttaaatgttttagccaattttgaacctatcatatatttgatgccatttaatgttttgggtctccaaaagttgaagaagcaagtaggctttttctattgataatttagaggaggtttagggctgagcctcaaaactgaacatattggtatgttcactaactgacaatttcttgagatgttttctcatccttactatttttgttcatttgttctgtgtttctgtttgatattatgttatgtaaaaaatgaagagtgcatgattgtcagagaattctaaaaaataatgcattgattctttaaatgccatgacacattaaaaatcattatatagcaggtggcacaaagtattcatttaaatccgtatgtttgtttgttgactgttgagacacaaatgcatgtacactatgatgctttacttgtttcaagcattctagctctactacttttcttttgtttctcaaatcaattatttagtttatagatggctgctttaaccagttgagacatgagaattaagtggcactaataggattgctttataatgaacaaaataacttccacatatatttcttcacagttcaatgttagttagctgatccatatttcttaccctaattattctaccagatccggtttcacttgtccgtgatcacaacatcaaagaaaaactagtggaacaaggcatatcagtccaaagctacaatggagatctgttgtatgagccatgggaagtatatagcgagagtggacgtgcctttactacctttaatgccttttggaagaaatgcttgcacatgcaaatggatattgtttcagttgttcctccatggcaattaattccagctgaaggtatgatatgactatattaacacaatgcatgttactttgcattgattgtttctcaataatatgattgttgatatcgggttactgctagaggttaaaaactagaaaggaggtctagttctaagtcaattctattatggaaactagcagaaatctgatcaacttcttctctctttatatcaacctgtctacatactgaattgtgtacatatatggacacaaaaaacatgtgagacattgtttctcttcctttggatgacaggaaaagttgaggaatgtccactggaggagcttggtcttgaaaatgaatcagaaaaaccaagcaatgcattactaggacgggcatggtcgccgggttggagaaatgctgacaaggctttaacagaattcgtggagcagcatctactagactactccaagaaaaggctgaaggttggtggagactccacctcactcttgtccccatatcttcattttggagaattgagtgtgaggaaagtttttcaagtgacacgtatgaagcaaatattatggacaaatgaaggcaacagtgctggtgaagagagtgtaaatcttttcctcagggccattggacttagggagtactcacgctatctttgtttcaactttcctttcacccatgagaaagcacttctgggacacttaaagttttttccttggaatcctgatgctgatatctttaagaattggagacaaggtaggactggctttcctttggttgatgcaggaatgagagaactttgggcaactggctggattcacaacagaataagagtaatagtttccagttttgctgtgaaaatgttgcttctaccctggaaatggggaatgaaatatttctgggacacacttcttgatgctgaccttgaaagtgatatcttgggttggcagtatatctcaggaggcttaccagatggccatgagcttgagcgcttggacaatccggaggtttgtcatgttttccttcattcaaaggatttacagtttgcttggtatcactcagatgtgattattttatattccctagtttaattaatttaaatttctgtacatttttttaagtttatttaatcatcatatcgtgtataacatatcactacctgttatactatttgattttactgcagcaaaaaattcttgtttccttaccattcctctctcctcatgtgccattttttgagatctaaggagtttgattatgctaaacgtaatagtaacactgcataaaactagaagatattaattttgtgtagtgaagcaaaaactgacacaatctgagttaccttgatgccagttggaaaataagagacttactttttcatattttcttcaattcattttatacctggtgaaatttatctgttcatatttcttttaccagttttaaaaggaataattctccaacaaccaaagtatatctcgtttctgtctaacatggataatttgaagttctgtttcatgtattagtgtagggcatgccaatatatttgtgttttgatattttactttgattatttatctgattgaatatccatggttctcttagttcttttatccattaaaaaactctagattaatatttctaagaagaactatagtagttgaaagatatcttttgcaaatatgcatatttaactgaggttgttataacttgttccttccctcaaaaaaaaaaaaaaaagaaagaaaaagaacctattagcctccttcattggatatattacatctataaggagtaaattctaccggttcagagaatagaaaaataatcaaaataaaagtcagcagtctcacatctctaattttggtgacagattcaaggggttaaatttgatccagaaggtgaatatgtgagacaatggctacctgagttggcaagaatgccaactgagtggatccatcatccttgggatgcaccgcttactgttcttagagcagcaggagttgagctgggtcaaaattatccaaagccaataattgatatagatttggccagagaaagactcactgaagctatattcaagatgtgggagtctgaagcagcagcaaaagctgcaggctctgaaccaagggatgaagttgttgtagacaactctaactctcttgaaaatttggacactcgaaaagttgtcgttctgggaaaggctccatgttctactatttcagctaatgatcaaaaggtgccagcacttcaggattccaagaatgaaccgcctacgcggaagaggccaaaacatatggtagaggaggggcagaaccaggataactctcaaaatcataacaaagatactggcatgtcaagcattgaccaagacatttgctccacagctgattcttcatcatgtaagaagcagtgtgccagtacaagctcatattcattttcagttccacagcagtgctcctcatcttctaatctgaagtggccatggcaagatcagactgacatggagcagagttcaagcaaagatggtaagtatattctttcatttccaagggagaaaagaaatgaaaatacagaatcaaattactaaactaaatattggatgggtagagccaaatagtgtgaactgtacaagttaacaataacattaattaaattaataaaaaatgaaaagaaagaaaggctccggtgtatagaaaggacctgcccgtttctaaaaaaaatcatagaaatgatggaacccacccattttttatatatgtcctaagaaacatcttcacaaaaagttaattggataaatgtttgttataatattttagctgatctaagaaaatttcagaactgcattcattagtagcttaattgttaagtctaagctacaactgaatacaacagccatgaaactatttaagtctttggaaaggaaattgcaactggatggaatagttctagtttctaagaattagaaatgctaacatcgatacagtaacaattgagctgaagaatttagagaagagagaggaagtgtgtccagattcatccatgcatccacataccttttcttccttaagttttctcccttcacacatacataaccaattctttttcttctttgttctgttgctcatacgtagcataggtgaccccaatacagattgagttaattaggttcctctcatcaatttcgtagccttatgccacatgagcagtttatcccatgattcttaagttttgtaattatgttttggaactgagttcattagtgcatagtagtttataatttattagtattcgtattttctttaacgagaaaatcttgaattccattaactgattcacaacgaggttctttttataattattatgattattattattatttgacacaatttttttttttttacttttatatctttggtgtgctactaataaatacgaatttcaatgcaggagctatgtgaggttaatgttgttcttgttgataaaaccagtagcagctacattactcacggaaagaaaatggtgccatatttaaatactgcagtttgtttagcccatgctatcaatcagttgtgtaataggttatgaaatccaacaggaagaacacggattaaaacaatagtgaacattgtatattatgaacttgtgctgatgggctggtccatacacattctgacaagcccgtaattacaaactatataaaccaaatactctacacaatgtattactctgatatcacttgcattttatccttattactcgagctttttttgctgctcaattactcaattttgttcaaaatgttttaaaccataactgtaaaactagtgcagcctttcttaactttgttaggatttaattcaatcatgtgtaattaaaagttttagaatttcacactcttgataaatttcatttgtttaaaaggttcagctgcttcatttgggttggtaacacaaatctagagcaaggaaaaaatctcatatatatgctttcccatcaaaaacaacttcatactcaaaatcacatcgcattttatgacaatgatgataatgtgctatagcgggttgttcttttgaattttatgacttatattgaggaagaataaaaccaaaaaagtaattcaagatgtaaaatgaatatgtcctttatagtagctccatcaaacaactctgctatttatttgtagacaaaaaggtaattaaactttggaggctatacatgaatataacctcacttttattcatcaccttgtctacacacattgatcttaacatacataccccgagtaccaaattttgactacggtagaataatcaaattctaagcagaagaggtaaagttaaagttagcacagtcagtgtgctccaagaagagcgagcagaagccaagccttgaggttgctaaatcaaattgtagcatgttgttctccaactgatttgctccaattgtgattgaagtcattaggtgaaaaccacccaccacagctccaacttggtctgcacttgggtctgatccagcatccccaaaacccaagcaaattacgtcattaaactgcaccattgaattcgcaccaatgatgctccacaccacttcctcattctgcaataccagatttatcgttggcacacccgggcccattcttgaaaacccaatgtcttggttgcaaagcaagtcccaa

SEQ ID NO: 432 - DNA, 3733 bp, Glycine max
atgctaaatcttatcgcctgcagcattatttggttgttaaaatggtcaattatctttaggagtatatttttatataaatttttaggactttattttatgtttttgtagttaaccatcctttgttcatttttttattagtaagaattaaagacaagtataatagaatttacaataatttacgcatcatgtttaatcaattgacttagatccccttgatatcctttgttcatttgagcattttgcaaatgaaatttaaccataaaactagagtaaattgaaaaaatggtaaataaagtgtgtcctctacatttaataaactaaagaaataaaaatgtgagattaaattgttaaattggtcagtctatttatttaatttgtttgttttgatttctctattattaaaaaataaattttgttcctatatttgaaaattgatgtaatattatcctttttatcaacaccatttaaatttgacttaaatatatttttcatacctataatatagttcgttttaattttactacctttaaagatttttaactttcaatttactataaaaaaatccatctcaatacattcaaggtttgcaactcctatttatttattaattaaagaaagtatttaaaaaatatactatttactataaaaacaatcatctcaatacattcaagttttacacctcctatttatttattaattaaagaaagtatttaaaaatatactattaaataaaaaatatctcaaatataacttttaaagtattatattaatagttaacaaatttatcaaaatactttctttaaattagtataggaggatattggtaagaggtatttttaaatacttttaactttcaattaaccatgtataaaaaaccgtctcaataaattctagtctcacatcctcggatcctcctatttgttaactgaagaaactagaaagtagtactattcaatatcaagattatactattaacctttttctattttgataaatacttgcacatattaactaatgaacacgtaagtgatgaagtttatccctatgcaatacactagtgtgctcactgaatcaccaatcaccagccatggaaaaggttgaccaagctttcatccaatacccacaacacaggccaaatctcactatcatccaacctgaacacattcccataatagacctctctccaataaccaaccacacagtttcacatccatctcccattgaaggcttggtgaaggagataggaaatgcatgcaaagagtggggattcttccaagttatcaaccatggggtgtccctcactctaaggcaaaacattgagaaagcctcaaaattgttctttgctcagagtttagaagagaagaggaaggttagcagagatgagagttctcccatgggttattatgacacagagcacacaaaaaacattagggactggaaagaagtgtttgattttctagccaaagaccctacttttgttcctctcacttcggatgaacatgataatcgtctcactcaatggactaatccatcccctcaataccctccacacttcaggtatttattagggatcgaaaacatatttgatccttgttttattttttcttgtaattcaactgttaatatgaacaattagttaatgggttgtgtataaaatgatgtgaatattggtagggatataattaaagagtatgttgaagagatggaaaagctgtcctttaagttgatggagcttatagctttgagtttaggccttgaggcaaagaggtttgaggaatttttcatcaaagatcagactagctttcttagactcaactactatcctccatgcccttaccctcaccttgcccttggtgttggtcgacataaggactctggtcccttaaccattcttgcacaagatgaagttggaggacttgaagtgagacctaaagcagatcaagactggataagagtgaaacctattccaaatgcttatattatcaaccttggtgatatgattcaggtaccatttatagatatttgaaagagatgtggtttattcacttcattaatgtactgcagatacaaaatatatacaagtgaactagctaatcacttcctacaattatgggataacacaacaaaatacatgacttgataaggttgttgcagctagcagataatgagaatttaaatgcactgattcgaattcaaatttgtgcttctacaccattaccattataaagactgaaaaattgatgattggggttgtttatgcaggtttggagcaatgatgcctatgagagtgtggaacacagagtggtggtcaactctgagaaagcaaggttttccattccattcttcctcttccctgcacatgacactgtagtcaagcctttggaggagctaataaatgagcaaaacccttcaaaatttaggccatacaaatggggcaagtttcttgtccacagactggatagcaatttcaagaaacaaaatgcggagaatgttcaaacttatcattataagataagagagtagtatattagcaacaccatttagcttatgcttacaaattacattggtatgtagcagcgttgatccaagacaacattactgatgcaaatgactgaaatctaatttgctgctaaatttcctggtgtgcattatgtatgcaaggatcactgaataaaagagctaaagtaccatttatcatgtttatctcaataattgaaattgcattggacttcaattttaatgtttcaatttaaaattaacctctaaacaacctttggaccacattgaatgaattatctgttggaaagttttgtattacactttatatttttttttttaacaccaccgatgtcttttataagaagtatttctgtttgactggaataggcttaaatatgttttgctctggatataacacaattgcataagcttgtgagagacaaaagttttgctctgaatgtataacacaattgcatatacatttgatttgaataataatagaagtcatatgtggttcgcatgaactttttcctattcatgcaaaagcatggtaggaaagtaatccaattaagtggcaaggtgtcatctggcctaaatccacactccctttaccccttctctaatttcctctgaaatctacccattaatcattttaaggagtttaaaattaatgggaaagtaaaagaaaaaaaatgaatttttattcctaaaaaacaaattttctctttttcaataaaataaaaaaaatacatttttatctatattttttttcttttctattttctttcctctcatccaagcatactctggctagacttaaactctgattcactcttacagatcccacaaacacttaggtctcccagcatccaacaaccactctgcatcttcagcactgtgcttcctcaactgttatgatgaattttgagttttgaagcgtgaactctgtgttagtcatggccacagaccagaaatgtcaaatgagtcaccacctacattgtcctactcctttactcgaaaatattcaacatgttagattgccacaataccgaaatatacggcagagacaaattaaatacaaacttcgttggccatgtttgtgcaccatttatagtacttacatcatagtttgatgttagtattctcagtaagtcaaaccacaacagcaactaaaaaataacagcaagtcactatagaaaataaggagacagatacaggagaacaatcttcacac

SEQ ID NO: 433 - DNA, 5834 bp, Glycine max
taaatcctttttttttctccactattaaataacatttgataggatattcaccaatcttttttctattcttttacctcagtcaacgtaggaaattacatgtgtgatgtccccagtttccttcggtgtgatgtcccactcgtgatccacatactttagactttggtgggatcctcaccatacatttcccgggaaaagacaatttcacgattcaataacttctgactttaatgccaactgcattaaagtctacattactagctaagcctaatttagtaatttacactatgttcaatttgatttgttctttgtttgattcttctttagctaaacttcaagatgtgttggttaacactgaacatctagctcatgggtatttgataccttctctaatataatttgaagtgggtttgtggcttgaattgaagagtttctatcagttagtcatctttctttgtctctaaggatttgttcaagctctagttgtttgtcaatatatgtatgtatacagtcttctttgtttcgttgttatgtttttgagatgaaccgtgctatgcagcagaacctttttattgatctttagtcaattttggttaataattggagatttcccatttgcatgtttttatcattggtaccttggtggggtttagagtttagattgatgagtgtgtgagacatgtggggaaatgcttctatgagttggatttaggttgcatggcataaagaaaacaaagaggcaaagaagttggaattggagattcagataagataatctacccgttggtctgatatctaaggagttaagtcctttttcaccgtgatttgaggctataaatagctttgttatattgacaaaattccagatccaaggttttatagtcagtgccagggacttcagctgctttgtgttgtgtgggtaagaatattcaattcaataagaaaactatatagttttcaaggtgagtactgtatttgtttgtgtgtaaaaaaggaaacttaaggagaagtacttatagtttgatgggggttaaggctttggctatggcatgaggaatctgaagtatttttctatatgggtatgaataagactatagtttggtttaggagggaccttagaatcgaggacaatcctgcattagctgctgctgctgctgccaaggatggttctgtcttccctgtctatatttggtgtcccaaagaggaagggcaattttatccgggtcgagtgtcgaggtggtggctgaagcagtctcttgcacacttggataagtcactgaaatcacttggagctgaactaatgcttatcaaaactgatagtactcttgaggctcttttggaatgtgtaaatgcaattcaagcaacaaaagtagtgtttaaccatctctatggtaagggtttttgttcaagaagatagctttttatggaattaactttctttgttgaaggctctaaccatatttgtattgcttcctactataatttattttggtgctgttaaaaaatttgaaactccaaaagttgaggaagcaagtaggtttctgtcaaaatattatactgagcttagaacttaacgataaggtgggatattttttttattgtttgctttgtcttctatatatatatattaaaggattgcctagtgcactaggctcccatcactgtggggtcttgggagggttatattatatgcaaccagagggattatttccttgtctagaagccaaccatacggttatgccaagcttcatcttcatcctcattaaataattatattgtttttatttattcatagtgagttttgctgtggaattcgaattgcggtgtacatcaacagggtggaaacctggcattacatgcttaggacaacagaagatatttggataaacctgaagaagaacacaaaactatttaagtttctaaagttaaaacaagatcatctttttctgtacagtttgtactatatggttgaagtggagaatatattatctgattacacatttgatttgacaaaagcagtctgcaattttacaacatgacaccatcttgtcaaaaaccaaatgaatatcatctactgccatcaggcattttatgtaggcaaacattgtttttctttatgtaggcaaaaaatgtccttcttgatttctctcttccccgtttcacaaaactagaaaccatgcaatctatcttgaatactgaataagtgaatagaaaatcatttggttgacacctcatatgatgctgcaaaaattgataaaaatgcctcatagtgagaaaaatttctgatatagcttctcaattcaatgccagatatttgatcactatttcttttcccagatccggtttcacttgttcgtgatcacaacatcaaagaaaagctagtggaacttggtataagtgtgaaaagctacaatggggatttgttgtttgagccatggagtatatacgatgagaccggacatgcttttacaacctttgatcccttttggaacagatgcttgcatatgcaaatgaaagctttttcacttattcctcctcaattaattctagcggaaggtacgactatattcacgctactatggtttgattgtttcttgataatatgataattgatatcaggtatttactggagtcgagatatataaaaaccaatgagaatttgagcatatataatatcttcttgtggcaacaaccagctatgtgatgatgttattctgttattataccatcctgcccacaaattgacatatatttgtacacacgaaacactaagatgagattttggttctctatcttcttctgttgattacaggaaaagttgggaaatgttcaattgaacaactaggtcttgaggatgaatcagaaaaatcgagcaatgcattattaggaagagcatggtatccaggttggaacaagactgacaaggctttaaccgaatttgttgaacagcacctacttcactactccaaaaacaggttaaaggttggtggggattccacttcactcttgtcaccatatattcattttggagaactgagtgtgaggaaagtttttcagttggcacgtaccaagcagatattatgggcaaatgaaggaaacagtgctggtgaagagagtgcaactgtttttctcagggccattggacttagagagtactcgcgctatctttgtttcaatttcccatccaccatagagaagccactgcttgggaacttggcatttttcccttggaagactgatcctgccaactttaaggcttggagacaaggtaggactggctatcctttggttgatgcaggaatgagagaactatgggcaacaggatggatacacaacaaaataagagtcatagtttctagtttcgctgtgaaaatgttgctcataccatggagatggggaatgaaatatttctgggacacacttttggatgcagatcttgaaagtgatatcttgggctggcagtacatctcaggctgcttgcctgatggccacaagcttgagcgcttggacgatcctgcggtatgtcgtgttttcttgactcataagttttactattttctttgtgactctaggatctaaggatctcacattcatattttaatttctactcatttgaagtttgcgtgaccagcataatctatataaaatatcacattatgttgttcaatttgatttttctgaactgaaacttttttctgtgtttgataagacaaaattgcagcacagatcgcttcctagatttatgttgttcttgtggcagtaaaaacattatagattttcatttctgatttttttttaaatgcatttgatatctagagaaatttatccgttcatatttactttcgatttttttatgtggctatctgatttctgcttgacatagttaatttgtatgttcaaattctacagttataaattataattatataccaaatcatgaaccaactatccgaaatctaaagctattaggtgaaggacaataatggttatatattaaaattaagataactaacaaagtcctcttttggtcaagttgtatataatgaggaataaatactactcactcaaagcataagaagattctgacacattagagacagtactcaaacttctctatttttgtctcactttgggaacagattcatggggctaaattcgatccagaaggtgagtatgtacgccaatggttgcctgagttggcaagaatgccagctgagtggattcatcacccttggaatgcaccccttactgtgctaagagcatcaggagttgagttaggtcaaaactatccgaaaccaatcattgacatagatcaggcaagagaacaattgactgaagcaatattcaagatgtgggaaaatgaggcagcttcgaaaggatctggctcagaagagagacatgaagttgttgatgagagtgaaagtttggccattccaaaagttttcttgaaggacaaggtttcgcacatcacttcttcatctaatgatcagaaggtgccaacacttgataatccccagattgatcctcctaatagaaagagaccaaaatgttcggcagaggtcgagcagaagcagaataattcgcgaaatcttagcaaggataccggggtgtcaagcattgatcaagacgtgtcctccacggctgaatcttcatgcaagagggagagttcaagctcttattcattctctgtcccacaataatgttcctcgtcttctaatatcaaatttttttaagtcctttatagcttctcttgattcactaaggcattgtttcatgaaggatggtatatgattttgttggataaaatgcatgctcaagaaccttatcaaactcaggatattctttatctatcctctattaaaggcgtttggttttttactttattttttatggggagatgttaatttgttgttttgttagaaatgttaatccggaggattcgaacccacaacctttttttccttctttctcctttcacccttcccaactaatgggccaaccttatatctccctaaaagtcatttggttgtagatggttttacattatgaggatcaaccctcatgattatgtggtcggttataattagcctatctaattgctaagggttgcgctgatttgcttcagttgctaacttgtttcaattcaattatttatgttacagctagcctttattgatgtttgcatcagttgcatgtcaaaaatgccttttcttacagtgcctaaacaagccctttggactcagtttagacggtttaaactatgttgcagtttggacatcatagaagcatttttgattattttttgtctagctaataaaagtacccatgtctctctagtacagtgtatgtagataacttaattattacagggagtaatgaatgagtgataaggttaaaattagaagccttagggatttctttcaaacacaatttcaaacctaggatttttgtttgttaaaagtatttcttaagtattgggtgataattagtacaaaggtatttttctcaatgtaagaaagtatattttttaagaccaaaaaatgtatattctagatttgcttaaaggaagaagtttacctagagctgaaactattgaaaccgctatgatctttaacgtgatatattatttgaaaatggagatattatttcatatcttgaataataataaaaaaaattgaagggtaaataacttagagggttagagggtgatcaataagatattttaattaatttttaatttttgtattagttgaaaagtttatttgattgtttaataaataaatttttaaaatagtttttaacttttctgagacatgacattttttaaaacactaact

SEQ ID NO: 434 - DNA, 4000 bp, Glycine max
tatagtacttacatcatagtttgatgttagtattctcagtaagtcaaaccacaacagcaactaaaaaataacagcaagtcactatagaaaataaggagacagatacaggagaacaatcttcacacactaagaaactcactttgttttgatttcttgggttgtttgttggcttcttgttcaaatacactaatactttagtatttatactatattctgtcaaaaaaaagtatttatactatataaaacacccctgtataaaacactcctgcatacaaatgacacatgtctcgtgaaaatattaatacttcaatctaaacactcttctctaggaaagatactcaaaatacaataaatcaattttaattaatgctacactaaatgatactaacataattgctccactttatatcgaatagtcacaactactatgttggcattgcaaaaaaacaaccaatcacagcaattatgcaataaaaacaaaacattacccatgtgtggcaaattcactattagcaccatttagccattgcaagtatatatggaggtagtttaatgccatcttgtttagatgaaataactaagttgacaactcctcggagaaactggtgaaacacatccctttgaaaataatcataaaattacttaaaagttaaactaatttgtagctatctgaactctttaaaaaattatttataggttttaaattaaaaaattctaattaattgaacccttaaaattacaattttgttataattaaatctctatagttcataaaactgtcataaattatcattttctgataattttaagctgtcagaaacaaactttaaaattcaactacaaaaatttcacaaaatcaataactcaattacaatttttactaatttgaacataattaaaaaatttcaaatactgtaagacctgcatattaatttaaccttactttaataagattaatttaacctttctaaatatttttttggtattaaccttactaaaattgaaccttaagagaatcatggttcaccaaaaggctttcatatattcggtctactagtgaaagttctctagcaaaagccatgggagaggtcgacccagctttcatccaatacctacaacacaggccaaagttctctaccatccaacctgaagacattcctgtgatagatatctccccaataaccaaccacacagcttcagatccatgttctattggaggcttagtgaaggagataagaaatgcaagcaaggagtggggtttcttccaattatcaaaccatgctgtgcccctcactctaaggcaaaacattgagaaagcctcaagattgttctttacacagaatttggaggagaagaggaaggttagtaaagatgagaacaataccaccggttaccatgacagagagcaccccaagaacattagggactggaaagaagtgtttgatttcctagccaaataatccactttcattcctctcacttctgatgaacatgatgatcgactcactcagtttgactaatcaatctccttaataccttcaaaatttcaggtaactcatcttcacttttggaatagttatagacataaacagcaaatttatggtgaaaacagatgtatcttttctttgtatattttaaactacgctacaatatatttttagtccttgtactttgatcaatttagtgagtccgtgaactttagaaaaacagtgatttttttgttcttcttcacagacggttttcattttcaccataaggagggacgaaaaccaatattttttgaaaagtttagggaccaacttgatcaaagttgaagttcagatactaaaacaagttttaccgaaagcacagaactgaaaacatatttcactctttaaactatgttctaaatgatgtccatatgagcagggttataatacaagagtatattcaagagatggaaaagctgtgctttaagctgttggagcttatagctttaagcttaggtgttgaagcaaagaggtttgaagaacttttcatcaaagatcaaactagttctattctactcaactgctatcctccatgcccttaccctcaccttgctcatggcgttggttgacacaaggaccctggtgccttgaccattcttgcacaagatgaggttggaggacttggagtgaaacgtaaagctgatcaagagtgaaaccaaccccagatgcttatactatcaactttggtgacattattcaggtacaacttcagtagcaatattaagactggaaacttgaaattttattgactcgtaatctagttataagaaacagccaccacctaactcactcaagaaagttaactttaagggaagaggactgcacatgtcatataaggacaaccatattgtagtttctgttgttggttcgtctggaattggatttggattctttaagcaaagtcttaagcaaagtctcaagtttgagtattgtggatgaaaaaacgtgtctaaaagaggagacctactaatagtggtctgcccagcttcccaggagagattagtcactaacaaaagtataaatacttcacaccaatgtcatgatgaccctaaaaaaaacatattctaatctttgagtttatgaactatttattcccgtaattagtggagagaatttttatttgaggattggagttgtttgtgcaggtttggagcaatgatgcatatgagagtgtggaacacagagtggtggtcaactctgagaaagaaaggttctccattccattcttctacctttcgcatgaaactgaggtcaagcctttggagaagctgataaatgagcaaaacccttgaaaatataggccatacaaatggggcaagtttctcacccatagaaagaataccaatttcaagaaacaaaatgtggagaaccgtcaaatttatcattataagcttgcttaaaagatagtatagtgacagtataatttagcttatgtatgttgggtataatgtgttgaagcagattgattcaagacactgcttctgatatccacggcaattatatttgctgctaaagttacttgtttgcattaagtatagaactatagaagtatagcccaataaaagaaaactaaatatcgtttattaattttcaagaatcaagacaaaacttgaaattacattagtttttaaatttcctattttaacattttttgttccttgtgtatctttttgttaattagattcttgcggattgtaaagtgtaaactatttctttattactattaagtagccttctccatcattagtttaatgaacaagttttatactactgtgtttatgaggttgatgtaaatcaaatcacaatcaatattattacatgattaaacaatagcaagcgttcaaaaatagtttgtggaactttcactgaatggctttttgttggactgctgagtctgaattcaataaattatgtgttggttgcaagagtttggatgcattattatctatcagccaaatttcaatcactttcaaagcatttttttaaacaaaatagtttttttttttaaatccatttctccctaacaatcttttttttttttactttaaaaaatgacgatacttacataatacttttttttacagtttttggctatcaattttctttactttttttctttctagagaggacatattactgtttatttaatttatttaactggatcaagaagatataaaaaaaatgtttgtacactacttaacaaatcaattttttttaaaccacacttatctttcactaaagcttatttatttaagttaaataagactcataaactgggaagctttccaaatcaatctacaaattgaaaaaacatagtaacgagagttattaatatcttttttttaacttggattttagtttctttttaattatttttgagtaatcaatatatattttctaggatcatcccatcttatttgatttcaagactatttaattactttgaaagttacgtggtatatctgcacatg

SEQ ID NO: 435 - DNA, 6503 bp, Glycine max
gtgccaaaagaataaaataaatagataatttgaacaaaataaatagataatttgaacaaaataaacgtgtgttagtaacattttggactaaaaatacattttgttacgttttcgtgttttttcaatttgatcatttatattttaaaattttcaatttataaataaatcattttggtcatattcatccacaatgtcaaaaatattaacaagaatgtccaatatagtgacgatgtttttccattaatgttgaatggatttatgatatgacgatgatgcttttaaaatgattttattttaatttacgttttaatgtttccaatttagttagttaatttttaaataattccatttttgttcaattttatgctcatttcatatataaacccgttttgtacagtttgcactttatgaccttatactaaaactgccaaattacttcaaaattctttggatttaggtacaatttagcataatgcacaatatcatggtacggctatagaaaccataattatacatttataatatttaaaagatgtaacttacataatagaaattaagaaacgaaatttgtacatttgtgatacttatcaaactaaaatttcaatcaagcccatgacttaaaacgttatttgaaataatatttttttataacacatatttttaacttattatatacatatatatatatatatatataaatatttattcaaattttttaaacatgttgttttatatttttaattattttaacagttaattttattacatatttataatttaataaattaatttaaaaaaatttcgctatcaacttttcgagcaaacttttgaatcttaaattaatttttttgaataatagcttgcatctttataatatatattcactctctttctctaaatgtaactattgcggtattttaattttaattttttctgatcctctcttctatgtacttgtttttagtacatttgtctcgtttgtaaaaatatcagcatatcatcattcattcctaccaaaaacgcccttatagctccctccccataacaagaaactcagcggttaatggtggacggctgtttccgtcgatgagaccacaactccactgtgtaacaaaataaaataataaactccttcccttgaccggtgaccgtaccaaccggttcgaagttggaaccatgagagagaaaatgtttatatattccatcatctcataaattgggtctgcactttatgttccttttggatcctctcacatctctctttctttctccggtgtcatggaatccggtagtgcccgatgtttatattccctccggttctgaaatcatcaaatgcaactaccaaacctcgagaagcttccttcacacacttccttctgtgagtttccttctcttcttccttctcggtcgccggacaacttctccggcgtaaccacggttaccggagtatcttctaattattttttccctctctttgcttctattccgcgcagtttccttgttcttcgaacaagctctttctcattccatcaccacaacttccgatattgcatcttcaactgttttggttacattttacgcgtaataactgattgtttctttcgattggaaccatcgctcgaagagaatctccggtgacgtcgaagcaatattagtttactgtatgtattagttcggattaataataataaagcgcataagtgataacaacaacaaaaaaagaatatctgagttgaaaaattgctagaagaagattaaacgcgatgttggatcttaatctgactgccgagtcgactcagaacgacgagttgctggtgctgttggacaagtttcctgaagcttcgtcgggaacttcgaattcctccatcgtgaatgcggaggggtcgagcaacgaggactcgtgctccacacgcgccggcgacgtgttcaccttcaatttcggaatccttaaggtggaagccgcgaatgacgtcgttgccgcggcgacgaaggagctgtttccggtgagctcggagaattggcaggggcagagttcgacgtcgttgtttcaggcgaggaagagtttgatggatctctcactagatcaacaacacggggaggtgaaggtggtacaggttcagccacagcctaaggtgaagaagagtaggagaggtccacggtctcggagctctcagtacagaggagtcaccttctaccgaagaaccggaagatgggaatcgcatatctggtttgttcacttcacattgttcaatcaagcgtttcttgtatatttcactattttgcctttttttattaggtttttgttggaaggaattttaattttctgtggaatttgcatttggttaatcatatggttgaattgaattgcatctgaccttaatttgttgtttggtgtagggattgcgggaaacaagtctatttgggtatggatttgtatttttgactaattattgtttccatttatatttgaatttattattctgcgatttgctatttttagcgtttttttattagattggtattgggcattgtaggtggatttgacaccgctcatgctgctgctaggtaaaactttttggacatattttaaatattctttatcgtagttttattttatttttttaccaattaaacctgttacctgtccttcgtttgattggtatcttccttaattgacttggaaatttcaaatttagggcctatgatcgagctgctattaaattcaggggacttgatgctgacatcaattttaatctcgttgattatgaggaggatctaaaacaggttggaacacgaataagcttttggtgaatttgaatctagatggagcttgtgattggttttttactggtttgttaatgatgggcagatgaagaatctttccaaggaggagttcgtgcacatactccgccgccacagttccggtttctcaagggggagttcgaaataccggggagtgacacttcacaaatgtggccgttgggaagctcgaatgggacaattccttgggaaaaagtgaggacctacttttttttatgttaactataactgatgttatggtttgtcatgtttataggattagatattagtacgaattattagagatattagatattagtacgaattcaagtacctattgatttcagttgtaccaatacctattggtacaactgaagtacgaattcaaagcgaattgttttcggtttggtagtcaaatgggtctttactcttctggctttttccatgtttggaggaacatgtctaggatgcctgtttcacagaaacagttggcagaggtgtttttgttgttatagagattgcaatgctttcgtgcaggtatatatatcttgggctattcgacagcgaagtagaagctgcaaggtcctaattatacatgaatttcattctacctgcactgaattttttaccctgaattatcaaagctctttacggttccaaccaacatatgtctcccttttgattttctggaaatcagggcttatgacaaggcagctatcaagtgcaatggaagagaggctgtgactaactttgagccaagtacatatgagagcgagatgaaacccgaagctattaatgaaggtagtacttcatggcatgatactctagagatatattttatttacaattgattgtcagtgttaaaaagaaatatgttcaatgtgaaatgaggtttgtatttgtcttcaacacaggtggcagtcacgaccttgacctcagtctgggcatagcgaccccaggacatggtcccaaagaaaacagggggcatcttcagttccagtccatcccttacaacatgcatcctggaagaagttcaatggtatataattaaactttacatcttcatttactttaagcacggaagcaaaggtttatatcacattataactcttcataggtcatggatgatagttattggacatattttttaatggaagcagtgttcttttgtcctttgtgggttcacttgtagctaattaccgcctacttactttactttgacattgttgatctttatgaaacatgtggattttggaattgttttgtaattgtaactacctcacattgatgtcttaatagtggtcatgataggttgggttctctttgtttgcagatggagactaatattaattccgttattggtgatccttctttgaaaagactggttgtaactgaagagcgtccttctgtgtggaatgccgcatattccactttctttcccaatctggttagtttcaaatgcctgttacaactgattacttattttttttactaaatgcttcaaataaacattcaagataatttccgtttttactaaatgcttcatataatgcgtccttctgtatgaagcattcatgataatttgcttttgattttgacataacattcgaagttgagttttatgctctgcgaatcctctttacatactgatctttatcaacttttggtgcaatctaagttatcggggaatttgtctccatttagtatatatttgatgttccatgtcacttactcttttttgacatgatgagttgttcccaaatatgttaaaaaaatagatcttaaagtggtgagtctataaataggtccttctaatacatagatatattcttggtaatgagctgaatttggaatatggctaataattcattgacaaagaccacgagtccatgacagaattaggataatatttcggtcaacattccttttcaagttcgtgtggaggtgattctgggggatgatgtagcattaacattaacattgtgcatcaatacaacttgataccaccattggcgtgttttcttgtataggaagatatttaattatattgttgaaatatttgacaggaaagagcagagagaatgggcacagatccttcaaaaggagtcccaaaccccaactgggcgtggcaaacacatggccaggttactgacaccccagtaccaccgttctctactgcagcatcatcaggattctcaatttcagccacttttccatcaactgccatctttccaacaaaatccatcaactcagttccccatagcctctgtttcacttcacccagcacaccaggtagcaacgcacctcaattctataactattacgaggtgaagtccccgcagccaccgtcctagcctatcttgtaatacaagtacaaatggttaatcgaaacaaccttttgcgcttaaaactcatcgtataattctgttactgattgatgtatacttagatacgacatctgattgcacttcttggtttaacaaaccattatgcacaaatgatgtatgaaggaaaaagctctttttgagtgctccagttctcttaggattattttttcatcaaaattagtatcaagttgtcagaattcgtgtattcacccaccaattttgtgaatatatgcctttgtgtatgcaaccctgaaaatgggaggaaaccaaaatatgttgcatttttcattgaatatttcacaacttgatttgactaagtcttacatattgctacgatatttgggagtgtaagtggtaatcccaccacacaagttctgaagttcaattctcaaaacgacagtaaaacttttttttttctttcctgtttgcatgctttagggctcggtactttgttgttgctcgtggaatgtttggatgtgataaaagaaaacagaggagaaaagaaaaaatacagataattcttttattctacagagaaagtgaaaagaaaaaagagatgtctttcaaaagaacaatccgactcaatttctttctactatattcgttatgacttcactcccactaaatttagtttttatatttttttaatatcaatttttttacctggtggtcatttagattttggttactaccattaagtgtattgctagatttttttatactcattatattttagaatttttactaatctagataatcattttttactaaagattagcagtgtgtttagtgcatactttttttaaaaactagtattttttaaatagctgttttttaaaattacatcttatatattcagtaaaaatattgaagtgatgaaaatacttatatggtaatttttttccatcataattcaaaagtagaattttgaaaattatgattaatttaccaaattcttttagcttttccccctaattaaaatttactataaaaatattttttttaaataattaacatgaaatatgttaccctaaaatcactttttacttaatatatccaaacagaaaatttattttaaataattaactataaccataattaattgtaatttaaatatttttcgacaattactttatacactcattatacattaattcttatgattttcaacatttttttaaacagaaagtagataaaagaagattgaattgtgtttatgtggagtgagaacgagcagtgggtgacagaagtcattgcagatcacataacatacttgatattggtcagagagcagcattataattattattcaagtaa

SEQ ID NO: 436-455 - skipped (20 entries)

SEQ ID NO: 456 - protein, 234 aa, Glycine max
MFTLNHSSDLYHVSPELSSSLDTSSPASEGSRGVAFSDEEVRLAVRHPKKRAGRKKFRETRHPVYRGVRRRNSDKWVCEVREPNKKTRIWLGTFPTPEMAARAHDVAAMALRGRYACLNFADSAWRLPVPATAEAKDIQKAAAEAAQAFRPDQTLKNANTRQECVEAVAVAVAETTTATAQGVFYMEEEEQVLDMPELLRNMVLMSPTHCLGYEYEDADLDAQDAEVSLWNFSI

SEQ ID NO: 457 - protein, 174 aa, Glycine max
MEDRDHCCSNNSTMITTTKKRTGRRSPTSDKLKNQHREKQSMKPYRGIRMRKWGKWVAEIREPNKRSRIWLGSYTTPVAAARAYDTAVFYLRGPTARLNFPELLFQDDDQEGSDSVQHGAAGNMSADSIRRKATQVGARVDALQTALHHHAPSTNSLNLKPDLNEFPKLEELQD

SEQ ID NO: 458 - protein, 368 aa, Glycine max
MDNNNDFWKFSDQLRLESGLANLSLNDYSIWSNSYSSKRPDQRRNFDVKGSDFNNNNNSSKAFDDDFNDGWKITNSNGPLFSMPHNNNNNTLEVGGFNKGGGIYSNTNTTISSYHPNNLNNNAFGGFNKGIYSNTTSSPYLNNNHHHLDDNNNLNRNNLKGYKTYFKGEDQFHTPKSAKKKNTTNNTNNKKHGDNTNNNDGTKTGAEKKFKTLPPSESLPKNETIGGYIFVCNNDTMAENLQRQLFGLPPRYRDSVRTITPGLPIFLYNYSTHQLHGIFEAASFGGSNIDPTAWEDKKCPGESRFPAQVQVITRKVCEPLEEDSFRPILHHYDGPKFRLELSVPEALSLLDIFANQNSFDDIFKAIPA

SEQ ID NO: 459 - protein, 512 aa, Glycine max
MWLASFRSLLCKCFIPRWLGLCRLIKTTLIPLERRMLLAMLLNLVLASFVFLSFIRDGSAGITSSFIRSEWPAVDIPLDHEAFAVPKGYNAPQQVHITQGDYDGKAVIISWVTTEEPGHSHIQYGTSENKFQTSEEGTVTNYTFHKYKSGYIHHCLIEGLEYETKYYYRIGSGDSSREFWFKTPPKVDPDSPYKFGIIGDLGQTFNSLSTLEHYIQSGAQTVLFVGDLSYADRYQYNDVGLRWDTWGRFVERSTAYHPWLWSAGNHEIDYMPYMGEVVPFKNYLYRYTTPYLASNSSSPLWYAVRRASAHIIVLSSYSPFVKYTPQYMWLKEELKRVEREKTPWLIVLMHVPLYNSNGAHYMEGESMRSVFESWFIEYKVDVIFAGHVHAYERSYRYSNVDYNITGGNRYPLPNKSAPVYITVGDGGNQEGLASRFLDPQPEYSAFREASYGHSTLEIKNRTHAIYHWNRNDDGKKVPTDSFVLHNQYWGHNRRRRKLKHFLLKVIDEVASM

SEQ ID NO: 460 - protein, 254 aa, Glycine max
MKMKVLVFFVATILVAWQCHAYDMFPLRMNTGYGARTPEVKCASWRLAVEAHNIFGFETIPEECVEATKEYIHGEQYRSDSKTVNQQAYFYARDLEVHPKDTFVFSIDGTVLSNIPYYKKHGYGVEKFNSTLYDEWVNKGNAPALPETLKNYNKLVSLGFKIIFLSGRTLDKQAVTEANLKKAGYHTWEKLILKDPQDPSTPNAVSYKTAAREKLIRQGYNIVGIIGDQWSDLLGGHRGESRTFKLPNPLYYIQ

SEQ ID NO: 461 - protein, 463 aa, Glycine max
MASKKQEERAEAAAKVAAKELEQVNRERRDRDFGVVAEQQQQHHQEDQQKRGVIGSMFKAVQDTYENAKEAVVGKKEATNNAYSNTEVIHDVNIQPDDVSATGEVRDISATKTHDIYDSATDNNNNKTGSKVGEYADYASQKAKETKDATMEKAGEYTDYASQKAKEAKKTTMEKGGEYKDYSAEKAKERKDATVNKMGEYKDYAAEKAKEGKDATVNKMGEYKDYAAEKTKEGKDATVNKMGEYKDYTAEKAKEGKDTTLGKLGELKDTASDAAKRAVGYLSGKKEETKEMASETAEATANKAGEMKEATKKKTAETAEAAKNKAGEIKDRAAETAEAAKNKTAETAEVTKNKALEMKDAAKDRTAETTDAAKQKTAQAKENTKENVSGAGETARRKMEEPKLQGKEGYGGRGDKVVVKVEESRPGAIAETLKAADQIAGQTFNDVGRFDEEGVVNVERRKK

SEQ ID NO: 462 - protein, 666 aa, Glycine max
MAGSWARRSLIVLAIISFGCLFAISIAKEEATKLGTVIGIDLTTYSCVGVTDAVEIIANDQGNRITPSWVAFTDSERLIGEAAKIVAAVNPVRTIFDVKRLIGRKFEDKEVQRDMKLVPYKIVNKDGKPYIQVKIKDGETKVFSPEEISAMILTKMKETAEAFLGKKINDAVVTVPAYFNDAQRQATKDAGVIAGLNVARIINEPTAAAIAYGLDKKGGEKNILVFDLGGGTFDVSILTIDNGVFEVLDTNGDTHLGGEDFDQRIMEYFIKLIKKKHGKDISKDNRALGKLRREAERAKRALSSQHQVRVEIESLFDGVDFSEPLTRARFEELNNDLFRKTMGPVKKAMEDAGLQKSQIDEIVLVGGSTRIPKVQQLLKDYFDGKEPNKGVNPDEAVAYGAAVQGSILSGEGGEETKDILLLDVAPLTLGIETVGGVMTKLIPRNTVIQPKKSQVFTTYQDQQTTVSIQVFEGERSLTKDCRLLGKFDLSGIPPAPRGTPQIEVTFEVDAERGILNVKARRAKGTGKSERSPISNEKGRLSQEEIERMVREAEEFAEEDKKVKERIDARNSLETYVYNMKNQISDKDKLADKLESDEKEKIETAVKEALEWLDDNQSMEKEDYEEKLKEEAVCNPIISAVYQRSGGAPGGGGASGEEDEDDSHDEL

SEQ ID NO: 463 - protein, 274 aa, Glycine max
MCTALKTNYQLSEEIGRGRFGTIFRCFHPLSNEPYACKLIDKSLLHDSTDRDCLQNEPKFMTLLSPHPNILQIFHVFEDDQYLSIVMDLCQPHTLFDRMVDGPIQESQAAALMKNLLEAVAHCHRLGVAHRDIKPDNILFDSADNLKLADFGSAEWFGDGRSMSGVVGTPYYVAPEVLLGREYDEKVDVWSCGVILYIMLAGIPPFYGDSAAEIFEAVVRANLRFPSRIFRTVSPAAKDLLRKMICRDSSRRFSAEQALRHPWILSAGDTAELT

SEQ ID NO: 464 - protein, 521 aa, Glycine max
MLLELALGLLVLALFLHLRPTPTAKSKALRHLPNPPSPKPRLPFIGHLHLLKDKLLHYALIDLSKKHGPLFSLYFGSMPTVVASTPELFKLFLQTHEATSFNTRFQTSAIRRLTYDSSVAMVPFGPYWKFVRKLIMNDLPNATTVNKLRPLRTQQTRKFLRVMAQGAEAQKPLDLTEELLKWTNSTISMMMLGEAEEIRDIAREVLKIFGEYSLTDFIWPLKHLKVGKYEKRIDDILNKFDPVVERVIKKRREIVRRRKNGEVVEGEVSGVFLDTLLEFAEDETMEIKITKDHIEGLVVDFFSAGTDSTAVATEWALAELINNPKVLEKAREEVYSVVGKDRLVDEVDTQNLPYIRAIVKETFRMHPPLPVVKRKCTEECEINGYVIPEGALILFNVWQVGRDPKYWDRPSEFRPERFLETGAEGEAGPLDLRGQHFQLLPFGSGRRMCPGVNLATSGMATLLASLIQCFDLQVLGPQGQILKGGDAKVSMEERAGLTVPRAHSLVCVPLARIGVASKLLS

SEQ ID NO: 465 - protein, 294 aa, Glycine max
MEDMNNMSGEITLPGFRFHPTEEELLDFYLKNMVVGKKLRYDVIGFLNIYQHDPWDLPGLAKVGEREWYFFVPRDKKHGSGGRPNRTTEKGFWKATGSDRKIVTLSDPKRIIGLRKTLVFYQGRAPRGCKTDWVMNEYRLPDNCKLPKEIVLCKIYRKATSLKVLEQRAALEEEREMKQMVGSPASPSSTDTMSFSSPQEEQNMPLPLLQHVLKKESETEDMVVPKQEKITNQLVLKDTNKSTCGTSLQMPFGKEKLPDLQLPMLSDWTQDTFWAQLNSPWLQNFTPTNILNFY

SEQ ID NO: 466 - protein, 159 aa, Glycine max
MEEAGLGDCCSSNTTITRKSEKRKQQHQQQEKPYRGIRMRKWGKWVAEIREPNKRSRIWLGSYATPVAAARAYDTAVFHLRGPSARLNFPELLSQDDDVSTQQQGKMSADSIRQKATQVGARVDALQTALQQSSSTHSISSSHVSYEKPDLNEYPKPED

SEQ ID NO: 467 - protein, 612 aa, Glycine max
MATLKELLPPAKSSSTAYYDHTNDPWFKQRFSSEEEEKSAAAAAAKQKPVPPYLKRAGFVPRKIEDFGDGGAFPEIHVAQYPLDMGREKSGAKPGSKILPVTVDANGNVAYDAIVRQNENARKIVYTQQKDLIPKFLKNDEDDDDVVSDDEAQKQIEETMQETKAALEKIVNVRLSAAQPKNVPKQNSDAKYIKYKPSQQSDAFNSGAKERVIRMVEMPVDPLEPPKFKHKRVPKASGSPPVPVMHSPPRPVTVKDQQDWKIPPCISNWKNPKGYTIPLDKRLAADGRGLQEVQINDNFAKLSEALYVAEQKAREAVAMRSKVQKEMMLKEKERKEQELRALAQKARSERIGGERIGVVPAAPPAVAVDEDDMRVDYEHEKENPRERDRERSFVKESREEKEERMQREKIREERRKERERERRLEAKDAAMGKRSKITRDRDRDISEKVALGMASTKPGTEVMYDERLFNQDKGIASGFATDDQYNVYEHGLFTAQPTLSTLYRPKKNLDDETYGGADEQLEKIMKTDRFKPDKGFAGASERAGPRDRPVEFENEQTDPFGLNHFLTEVKKGKKAMEKVGGGGTMRASAGSSMRDGNEGGSGRTRIGFERGH

SEQ ID NO: 468 - protein, 198 aa, Glycine max
MAKPSSEKPEEHSDSKYYKGVRKRKWGKWVSEIRLPNSRQRIWLGSYDTPEKAARAFDAAMFCLRGRNAKFNFPDNPPDIAGGTSMTPSQIQIAAAQFANAGPHEGHSGRPEHPPMESPSPSVSEGTIQTDSDVPTLNGSVTDLFTPVGSSGYASDYGIFPGFDDFSGDFYVPEMPNVNYGEENGEGFIVDESFLWNF

SEQ ID NO: 469 - protein, 261 aa, Glycine max
MGRAPCCDKSNVKRGPWSPDEDATLKNYLEKHGTGGNWIALPKKAGLKRCGKSCRLRWLNYLRPHIKLGGFTEEEDKIICTLYDTIGSRWSFIAAQLPGRTDNDVKNHWNTKLKKKFLAGNTSSTAATTSNNNVTFSNTSYSDQVKTLVLDHQKLNSADNWFDYSYNVLELEQTPIPVPFPMSQELEAFNYTAGSISCSAPPPSKEVSMLSNADNHTLWFGYDHASEDDPNLLEFVLDDDLLNHGFVSQDKSCSQVGPPSG

SEQ ID NO: 470 - protein, 225 aa, Glycine max
MNNPSSPSPCAAFADFYEQWFEELQSLMQQLRGEGRKEEVMEKVMWHHQNYYVAKSAAAEKDPLNVFLSPWATTLERSLHWITGWRPTTAFHLIYTESSLMFESHIIDILQGLRTGDLGDLSPSQFRRVSDIQCDTVKEENAITEELSEWQDSVSEMMGPGANINDKIGRLVCIIKKADDLRLRTLRSVVGLLSPQQAIEFLIASAELLVGIRGWGLNHDRPRGR

SEQ ID NO: 471 - protein, 359 aa, Glycine max
MESDLSWERNTLINELIQGMEVARKLKADLKLPYSVDTRDLLLQRILSSYEKALLILRCSNASTSELQGMNQATPTLLPESPLSVHGSPLREDVHGAIKDHHNSKKRKITPKWMDRVRVSCESGLEGPHEDGYNWRKYGQKDILGAKYPRSYYRCTFRSTQGCWATKQVQRSDEDPTMFDITYRGNHTCSQGNNAVLPPKSPEKHEKPAHSHNIDIHHAQASQESLAKFRSILSVNTDNLDNGDMAYAFTFPSTSFGCMKQDNHSLIPLALENDSFLSDLYQTHLLSPTTPESNYFPSPTFQMNEFDGIYNRSHSKSDINEIISTNTSATNSPIPDFNFSLDPVEIDPNFPFNTPGFLC

SEQ ID NO: 472 - protein, 789 aa, Glycine max
MHPFCCVSAISDQASPVKPSFADFAMPPLPAAAAATTVRSDSAPRHSHKHSHSHSGSQREQPVVDVKINDLVGNGISGILYKWVNYGKGWRPRWFVLQDGVLSYYKIHGPDKIVVNPETEKGSMVIGEESMRRITRNRNSYPSQHIRKPFGEIHLKVSTIRESKSDEKRFSVFTGTKRLHLRAETREDRVAWMEALQAVKDMFPRMSNSELMAPVDNVTVSTEKLRVRLMEEGVSEAAIQDSEQIMRTEFAALQSQLVLLKQKHSALIDTLRQLETEKVDLEDTVVDESQRQWNGEEASSRLAQEKFSEGTASESEDDNERNDAAEEETDDDDNAFFDTRDILSSSSFKSNGSDYRVSSFSSDDEGFYAFESEDDIDPSIRYVGTNYPHVKRRKKLPDPVEKEKGVSLWSMIKDNIGKDLTKVCLPVYFNEPLSSLQKCFEEMEYSYLLDQAYEWGKRGNSLMRILYVAAFAISGYASTEGRVCKPFNPLLGETYEAHYPDKGLRFFSEKVSHHPMIVACHCEGTGWKFWGDSNLKSKFWGRSIQLDPVGTLTLEFDDGEVFQWSKVTTSIYNLILGKLYCDHYGTMRIQGNQEYSCKLKFKEQSIIDRNPHQVHGIIQDSNGKTVSTLFGKWDESMHYVNGDYTGKGKGHESLSDARLLWKRSRAPKFPTRYNFTRFAITLNELTPGLKEKLPPTDSRLRPDQRYLENGEYDMANAEKLRLEQRQRQARKMQESGWKPRWFAKDKASGSYRYLGGYWEARQRGNWDSCPDIFGQIPSVHISDEGQITF

SEQ ID NO: 473 - protein, 581 aa, Glycine max
MFDGVPDQFHQFITPRTSQPLHLPFPLHASGTPNTTFPSNFDPYNNPSHQLPLQPNNLLHPLHHKDEEKEENTTTVPMNFEIQRDQRQQLPELIDPWTTDEVLTLLRIRSSMESWFPELTWEHVSRRLAELGYKRSAEKCKEKFEEESRYFNNDINYAKNNNNSTSNYRFLSELEQLYHQQGSSGDHLEKMTQPPLQKQGRMDHHALELEEEEGDSRNVIVDASVTKIQSDEALAVEKITKDRKRKRSDRFEMFKGFCESIVHKMMTQQEEMHNKLLEDMMKRDEEKFTREEAWKKQEMEKMNKELEMMAREQAVAGDRQAKIIQILNKFSATTSSPASHTLKKVNTHISQNPNPSQTENPTLSVAQDTLIPSTSSTSTPAPAPPQNPSSCSLNSQNNNHINNNIPVEKNSILNKGSSSNEKDDVGRRWPKDEVLALINLRCTSVNNNNNNEEKEGNNKVPLWERISQGMSELRYKRSAKRCKEKWENINKYFRKTKDITKKRSLDSRTCPYFHQLSSLYNQGKLVLQSESHLNNTPPDQNPEQVKPDQTTQAHESSSQVGSGSGFSVQQQQVPSLDFDQF

SEQ ID NO: 474 - protein, 268 aa, Glycine max
MAAATQLHLPPGFRFHLTDEELVVHYLCRKCASQEIAVPIIAEIDLYKYDPWDLPGMALYGKKEWYFFTPRDRKYPNGSRPNRSAGTGYWKATGADKPVGKPKPVGIKKALVFYAGKAPKGVKTNWIMHEYRLADVDRSVRKKNSLRLDDWVLCRIYNKKGAIEKQQPAPPPPSGVHKIECYEMEDVKPEYTAADCLYFEASDSVPRLHTTESSCSEQVVSAEFASEVQSERKRQGNSEFSYNYMDATLGNNQMSPLQDIFMYLSRPF

SEQ ID NO: 475 - protein, 345 aa, Glycine max
MCGGAIISDFIPAAAIAGSRRLTADYLWPDLKKRKSDLDVDFEADFRDFKDDSDIDDDDDDHQVKPFAFAASSRLSTAAKSVAFQGRAEISANRKRKNQYRGIRQRPWGKWAAEIRDPRKGVRVWLGTFNTAEEAARAYDAEARRIRGKKAKVNFPEAPGTSSVKRSKVNPQENLKTVQPNLGHKFSAGNNHMDLVEQKPLVSQYANMASFPGSGNGLRSLPSSDDATLYFSSDQGSNSFDYAPEISSMLSAPLDCESHFVQNANQQQPNSQNVVSIEDDSAKTLSEELVDIESELKFFQMPYLEGSWGDTSLESLLSGDTTQDGGNLMNLWCLDDIPSMAGGVF

SEQ ID NO: 476 - protein, 343 aa, Glycine max
MEYRLLPIFTLLNLALVAIHAALPPEVYWKSVLPTTPMPKAITDILYPDWVEEKSTSVNVGGKGVNVHAGKGGGGTNVNVGGKGSGGGVNVHAGHKGKPVHVSVGSKSPFNYIYASTETQLHDDPNVALFFLEKDLHPGTKLNLHFTTSSNIQATFLPRQVADSIPFSSSKVEVVFNKFSVKPGSEEAQIMKNTLSECEEGGIKGEEKYCATSLESMIDFSTSKLGKNVEVVSTEVVEDKETGLQKYTVAPGVNKLSGDKAVVCHKQNYPYAVFYCHKTETTRAYSVPLEGTNGVRVKAVAVCHTHTSEWNPKHLAFQVLKVKPGTVPVCHFLPEDHVVWVPK

SEQ ID NO: 477 - protein, 219 aa, Glycine max
MASNHEEVILLGKWASPFSNRVDLALKLKGVPYKYSEEDLANKSADLLRYNPVHKKVPVLVHNGNPLPESLIIVEYIDETWKNNPLLPRDPYERALARFWSKTLDDKILPAIWNACWSDENGREKAVEEALEALKILQEALKDKKFFGGESIGLVDIAANFIGYWVAILQEIAGLELLTIEKFPKLYKWSQEFINHPVIKEGLPPRDELFAFFQASAKK

SEQ ID NO: 478 - protein, 293 aa, Glycine max
MASSSIKHTHHLNRTKLFMKEETLLKKKHHYPKIIRIRVTDADATDSSSDDDEPSMSSTRRRVKNFVNEITIQGGGGGGGDVNVVSKKRRFKSGAGAPLCRRKTGAKKFRGVRQRPWGKWAAEIRDPSRRVRLWLGTYDTAEEAAIVYDNAAIQLRGADALTNFITPPPENRKTGYCSGEESRNNDDLRSPTSVLGRCSVSEEAVTANDVFGGSSECEYSCVSESVFPIPNEVVFDFESTLDMFDEGINNVVAETSIFLAEDLDLGFTSWHRECDNFQDIGGDLFVWDPLVAL

SEQ ID NO: 479 - protein, 449 aa, Glycine max
MGSHQQEPWLLENGKPRVLTKETRHGRSAHRMSSTSLRKKSSRTLVSKVPCATLRNLLSNLQEVILGTKLSILIPAIPAAIVAECFGFGRPWIFILSLLGLTPLAERVSFITEQVAFYTGPTVGGLLNATCGNVTELIIAIFALSSNKIAVVKYSLLGSILSNLLLVLGTSLLCGGIANVGVEQKYDRRQADVNSLMLLLGLLCYLLPMLFKYSGASAALTVDPSLHLSRASSIVMLIAYVVYIVFQLWTHRELFEEEDDGKDGEDGSEEQAVIGLWSGIAWLVGMTVFIAVLSEYVVDTIEDASDSWGLSVSFLSIILLPIVGNAAEHAGAIIFAFKNKLDISLGVALGSATQIAMFVVPLCVIVAWIMGINMDMNFNLLETGSLALAIIVTGFTLQDGTSHYMKGLVLLLCYIVIGACFFVQRTPFNNQADVTNITLKPATNAVLSA

SEQ ID NO: 480 - protein, 410 aa, Glycine max
MTSVGVAPTSGLREASGHGAAGVDRLPEEMNDMKIRDDREMEATVVDGNGTETGHIIVTTIGGRNGQPKQTISYMAERVVGHGSFGVVFQAKCSETGETVAIKKVLQDKRYKNRELQTMRLLDHPNVVALKHCFFSTTEKDELYLNLVLEYVPETVNRVIKHYNKLNQRMPLIYVKLYTYQIFRALSYIHRCIGVCHRDIKPQNLLVNPHTHQVKLCDFGSAKVLVKGEPNISYICSRYYRAPELIFGATEYTTAIDVWSVGCVLAELLLGQPLFPGESGVDQLVEIIKVLGTPTREEIKCMNPNYTEFKFPQIKAHPWHKIFHKRMPPEAVDLVSRLLQYSPNLRCTALDALTHPFFDELRDPNSRLPNGRFLPPLFNFKSHELKGVPAEILVKLVPEHARKQCPFLGL

SEQ ID NO: 481 - protein, 289 aa, Glycine max
MESKEEDVNVGANKFSERQPIGTAAQGGGDKDYKEAPPAPLFEPGELKSWSFYRAGIAEFVATFLFLYITILTVMGVNRSPSKCASVGIQGIAWAFGGMIFALVYCTAGISGGHINPAVTFGLFLARKLSLTRALFYIIMQCLGAICGAGVVKGFEGNANYELFKGGANFVNSGYTKGDGLGAEIVGTFVLVYTVFSATDAKRNARDSHVPILAPLPIGFAVFLVHLATIPITGTGINPARSLGAAIIYNRDHAWDDQWIFWVGPFIGAALAAVYHQIVIRAIPFKTRA

SEQ ID NO: 482 - protein, 370 aa, Glycine max
MALLLDNCESILLSLDTHKSVPAPFLTKTYQLVDDPSTDHIVSWGEDDTTFVVWRPPEFARDLLPNYFKHNNFSSFVRQLNTYGFRKIVPDRWEFANEFFKKGEKNLLCEIHRRKTHHQHHQQVQAMNNHHHHHKFGLNVSSIFPFHNNRLSVSPSHDSDEVIIPNWCDSPPRGVAGVNNNNSSSNNYNTVTALSEDNERLRRSNNMLMSELAHMKKLYNDIIYFVQNHVKPVAPSNNNNFPSFLLCSDNSNINNNTSPQTQTQAQASPMSNVSTVQRQLKQFVGCYSNNTKQARAVNSPTNSSITIVEEEASSNSCKTKLFGVSLQSKKRVHPEYGSNNVLQSSETNKARLALENDELLGLNLMPPSTC

SEQ ID NO: 483 - protein, 370 aa, Glycine max; identical to SEQ ID NO: 482

SEQ ID NO: 484 - protein, 879 aa, Glycine max
MDLVPSVKEKLNYFRIKELKDVLTQLHLSKQGKKQDLVDRILSVLSDEQVSKMWAKKNAGGKEQVAKLVDDTYRKMQISGATDLASKGQGASDSSSVKVKSEFDDAFQRDVKIRCLCGSRLETEDLVKCDDPRCHVWQHISCVIIPEKPTEGIPPVPDKFYCELCRLTRADPFWVSVAHPLHPVKLTTTSNPTDGNNPVQSVERTFQLTRADMDLVSKPEFDVEAWCMLLNDKVPFRMQWPQYTDLQVNGVPVRATNRPGSQLLGANGRDDGPIITPYTKDGINKISLTGCDARIFCLGVRIVKRRSMQQILNSIPKESDGEKFEEALARVCRCVGGGNAADDADSDSDLEVVSDTFTINLRCPMSGSRMKIAGRFKPCIHMGCFDLEVFVEMNQRSRKWQCPICLKNYALENIIIDPYFNRITSMMMNCGEEIAEIEVKPDGSWRVKVKSESERLELGNLAQWRLPDGTLCVSTDGDVKRVDTLKQVKQEGVSDSPAGLKLGIKKNCNGVWEVSKPEGTNTSSGNNLKRVFGNPEQVVIPMSSSATGSGRDGDDPSVNQGGGGHIDYSTTNGIEMDSLCLNNVDLAYEYTAPNTSAQVGGAEVIVLSDSEEDNDLLASPAIAYKNNRNDATDGYSVPPPVIVDSYTEDHNLGGNSCLGLFPNDDDFGMSSLWPLPSGSQAGPGFQLFGSDADVSDALVHLQHDPMNCSSSLNGYALAPDTALGSGGILQESSAGRSVADLNGGLVDNPLAFGGDDPSFQIFLPTRPADSSMHNELRDQANVANGVCTEEDWISLRLGGGAGGNNGDAPTQNGLNSRHQIPTREGAKNTLDDTASLLLGMNDVRSDRARRQRSDSPFSFPRQKRSVRPRLYLSIDSDSE

SEQ ID NO: 485 - protein, 540 aa, Glycine max
MWDLNDSPDQRINKDEESEEGCSSLNKTSFDGDDDNNNNKGKRVGSVSNSSSSAVVIGDGSEEEYEEEEEDEEGVGVGGGRSMKKRSSKIFGFSVTQNEEESMDSDHPPVTRQFFPVEDADVAVATGGGGTGVSSTFPRAHWVGVKFCQSETLGTGKSSVEVSQPMKKSRRGPRSRSSQYRGVTFYRRTGRWESHIWFYLCCRDCGKQVYLGGFDTAHAAARAYDRAAIKFRGVEADINFNIEDYEDDLKQMSNLTKEEFVHVLRRQSTGFPRGSSKYRGVTLHKCGRWEARMGQFLGKKYVYLGLFDTEIEAARAYDKAAIKCNGKEAVTNFDPSIYDNELNSAESTGNAPDHNLDLSLGNSTSNPGNDQALGNQAPNAVTHDQHMPSESNWRNGGIKPKLVNILPKPCYRSNNKDTHGRDVHGESETLRMLSQTHLHSPAFNEMQQRYGPYRSPGGESQMLQNFAHIHPPNFHFPRSSIGGRIGSDLSLSVADQQQWQTGPSRYLATAAASSSFQQEIRPSSQGWLQKNGLHSLMRPS

SEQ ID NO: 486 - protein, 418 aa, Glycine max
MDEIDVPPFFVCPISLELMKDPVTVSTGITYDRDSIEKWLFAEVKNDTCPVTKQPLLPDLTPNHTLRRLIQAWCTVNASHGVQRIPTPKPPVDKTLIEKLLRNTSASDSPSLQLRSLRTLKSIASESQSNKRCIESAEGAVNFLATIITTTTTTTTNLLDDDIELEIKTSTAHEALSLLHSIQLSESGLKALLNHPEFINSLTKMMQRGIYESRAYAVFLLNSLSEVADPAQLINLKTDLFTELVQVLKDQVSEKVSKATLQALIQVCSWGRNRVKAVEAGAVPVLVELLLECNERKPIEMVLVLLEILCQSADGRAGLLAHAAGVVIVAKKILRVSTMANDRAAKILLSVCRFSPTPGLVQEMVQLGVVAKLCLVLQVDSGNKAKEKAREILKLHARAWRNSPCIPHNLLASFPMSS

SEQ ID NO: 487 - protein, 443 aa, Glycine max
MAASVSTVGAVNRALLNLNGSGAGASAPSSAFFGTSLKKVIASRVPNSKVSGGSFKIVAVEEKKEIEETQQTDKDRWKGLAYDISDDQQDITRGKGLVDSLFQAPQDAGTHYAVMSSYEYLSTGLRQYLDNKMDGFYIAPAFMDKLVVHISKNFMTLPNIKVPLILGIWGGKGQGKSFQCELVFAKMGINPIMMSAGELESGNAGEPAKLIRQRYREAADMIKKGKMCALFINDLDAGAGRLGGTTQYTVNNQMVNATLMNIADNPTNVQLPGMYNKEENPRVPIIVTGNDFSTLYAPLIRDGRMEKFYWAPTREDRIGVCTGIFRTDGIPEQDIVKLVDTFPGQSIDFFGALRARVYDDEVRKWISGVGVDSVGKKLVNSKDGPPTFEQPKMTLEKLLLYGNMLVQEQENVKRVQLADKYLNEAALGNANEDAIQRGTFFQS

SEQ ID NO: 488 - protein, 880 aa, Glycine max
MDLVPSVKEKLNYFRIKELKDVLTQLHLSKQGKKQDLVDRILSVLSDEQVSKIWAKKNAGGGKEQVAKLVDDTYRKMQISGATDLASKGQGASDSSSVKVKSEFDDAFQPDVKIRCLCGSRLETENLVKCDDARCHVWQHISCVIIPEKPTEGIPLVPDKFYCELCRLTRADPFWVSVAHPLHPVKLTTTSNPTDGNNPVQSVERTFQLTRADKDLVSKPEFDVEAWCMLLNDKVPFRMQWPQYTDLQVNGVPVRATNRPGSQLLGANGRDDGPIITPYTKDGINKISLTGCDARIFCLGVRIVKRRSMQQILNSIPKESDGEKFEDALARVCRCVGGGNAVDDADSDSDLEVVSDTFTVNLRCPMSGSRMKIAGRFKPCIHMGCFDLEVFVEMNQRSRKWQCPICLKNYALENIIIDPYFNRITSMMMNCGEEIAEIEVKPDGSWRVKVKSESERLELGNLAQWRLPDGTLCVSTAGDVKRVDTLKQVKQEGVSDCPAGLKLGIRKNRNGVWEVSKPEGTNTSSGNKLKGAFGNPEQVVIPMSSSATGSGRDGDDPSVNQGGGGHIDHSTTNGIEMDSLCLNNVDLAYEYNEPNTSAQVGGAEVIVLSDSEEDNDLLVSPAIAYKNNRNDATDGYSVPPPVIVDSYTEEHNLGGNSCLGLFPNDDEFGMSSLWSLPSGSQAGPGFQLFGSDADVSDALVHLQHGPMNCSSSLNGYALAPNTALGSGSILQESSAGRSDADLNGGLVDNPLAFGGDDPSLQIFLPTRPADSSMHNELRDQASVANGVCTEEDWISLSLGGGTGGNNGDASTQNGLNSRHQIPTREGATNTLDDTASLLLGMNDVRSDRARRQRSDSPFSFPRQKRSVRPRLYLSIDSDSE

SEQ ID NO: 489 - protein, 382 aa, Glycine max
MGAYDQVSLKPLDSSRKRKSRSRGYGTGSVAETIAKWKEYNEHLYSGKDDSRTTRKAPAKGSKKGCMKGKGGPQNSQCNYRGVRQRTWGKWVGEIREPNRGSRLWLGTFSSAQEAALAYDEAARAMYGPCARLNFPGITDYASFKESLKESPMAASSSCSSAETATSDTTTTSNQSEVCAAEDVKENPRLVNVNDKVNDCHKAYEAASPTSRMKQEPKDEAVDHMVPGAGKILDVRPEGTHDAGQVAEDVNKDQMDLPWIDGFDFSDNYLNRFSTDELFQVDELLGLIDNNPIDESALMQNGNPQVDDTLSSFIYQLQNPDAKLLGSLPHMEQTPSGFDYGLDFLKTVESGDYNGGGEEPRFLNLDDDLNPDSKGMQARKDD

SEQ ID NO: 490 - protein, 278 aa, Glycine max
MANAAEVSALKRIKLHLLGELSPLATPQNKFDQTNPSPSESSNSESSSISLNHYFTDLLEPEIEFPLFEFDSKPQVIDLETPKTLISAEKKPQFNRKPSLLIAVPKKTEWIQFGNPEVAAPENQPEKKHYRGVRQRPWGKFAAEIRDPNKRGSRVWLGTFDTAIEAAKAYDRAAFRLRGSKAILNFPLEVNTAAETVSVAAVDVERKRRREEEEVVVEDVKAVVKKEKITEHDVSCFRGMPLTPSMWTGFWDSDVKDIFNIPPLSPLSPFGFSPLVAV

SEQ ID NO: 491 - protein, 410 aa, Glycine max
MSENMYPRLLFFDHTHSKMVWVKHQIQQKDGYLSYSPPLLSSSSSSSSSSSSSSPPYPLGATFHKESSLPSSTPPPPPSGTRISPAVLFIIVVLAVLFFISGLLHLLIRFLIKHPSSASAQSNRHQELSTSDALQRQLQQLFHLHDSGLDQAFIDALPVFQYKEIVGLKEPFDCAVCLCEFSEKDKLRLLPMCSHAFHISCIDTWLLSNSTCPLCRGTLLTQGFSIENPIFDFDDLREDEGCPCNGENGFNTRQKTVVVEESVEKEKGVFPVRLGKFKKLSVKGGGESEVGETSSSNLDARRCYSMGSYQYVVGNSDLRVTLNHDEIGKGQVTRLTKGMELDDGKVSVEEGDVEAKKISSVSKGDSFSVSKIWLWPKKGKLPTSLDGQFGRPMPSYLNTDFPRMREPEGA

SEQ ID NO: 492 - protein, 185 aa, Glycine max
MNGGESYGAIETQYIRRHHRHEPRENQCTSALVKHIRAPVHLVWSLVRRFDQPQKYKPFVSRCIMQGDLGIGSVREVNVKSGLPATTSTERLEQLDDEEHILGIRIVGGDHRLRNYSSIITVHPEVIDGRPGTMVIESFVVDVPDGNTRDETCYFVEALIRCNLSSLADVSGRMAVQGRTNPINH

SEQ ID NO: 493 - protein, 369 aa, Glycine max
METVLFNHSPPLEFKGLSKEEEDSLLGQVEIWRYMTCFTDSVALKAVIELRIADILDRYGKPLSLSQIVENIEDAPSPDASLLQRVLRVMVRRKIFSAQESETGETLFGLTRASKWILRDTKMTLAPMLLLENHPIHLNPAHYISEIIREGTKNGTAFFKCHGHEQFEMTGLDPEYNRLFNEGMVCTARVVSKAVITGYKDGFNQIKSLVDVGGGIGGSLSEIVRAYPHINAINFDLPHVVATAPKFDGITHVGGDMFVSIPSADAIYMKWILHDWSDEHCIKILKNCRKAIPEKTGKVIIVDHVLRPEGNELFTDVGIAFDMMLLAHNAGGKERTEENWKWLFKETGFARYNIIKINALPSIIEAFPI

SEQ ID NO: 494 - protein, 260 aa, Glycine max
MERSLSGSSEEEMSITKGPWTEEEDSVLFNYITVHGEGHWNSVARYTGLKRTGKSCRLRWLNYLRPNVRRGNITLEEQLLILDLHSRWGNRWSKIAEHLPGRTDNEIKNYWRTRVVKQAEQLKCEVNSKQFRDTLRFVWMPRMLERIQAQASSSSSSSSGQAHQTTLISNAQAHSDPCGVMTTNPSLLSEVSSSALDAHAPSLYDSSASYNLMGGGSSSSYSAEYCYYSDIAGNGFGGSDLWTDENICFLQQLLADHDLS

SEQ ID NO: 495 - protein, 355 aa, Glycine max
MCMERIRVKEEEAMTCGGGGSSSSSFISPQAQPMEGLHEVGPPPFLSKIFDMVEDPSTDSIVSWSMARNSFVVWDSHKFSAHILPRYFKHANFSSFIRQLNTYGFRKVDPDKWEFANEGFLAGQRHLLKTIKRRRNVSHSNQQKGGSGACVEVGKFGLEGELERLKRDRNILMAEIVRLRHQQLNSRDQLSAMEARMQATEKKQQQMMSFLAKALSNPSFMQQLVHKTPQSREVLLGVEINRKRRLPACPSVENLQQDNQDLATMETDMDTFFAPAYDNEFGNEIDEPASILVEDSILEDFLNKDLITGNPEDEVIIGDCTQVDVPMEDLVANPDDWSEQLQDLVDHMDYLGSKP

SEQ ID NO: 496 - skipped

SEQ ID NO: 497 - protein, 509 aa, Glycine max
MDSLLLLKEIATSILIFLITRLSIQTFLKSYRQKLPPGPKGWPVVGALPLMGSMPHVTLAKMAKKYGPIMYLKMGTNNMVVASTPAAARAFLKTLDQNFSNRPSNAGATHLAYDARDMVFAHYGSRWKLLRKLSNLHMLGGKALDDWAQIRDEEMGHMLGAMYDCNKRDEAVVVAEMLTYSMANMIGQVILSRRVFETKGSESNEFKDMVVELMTVAGYFNIGDFIPFLAKLDLQGIERGMKKLHKKFDALLTSMIEEHVASSHKRKGKPDFLDMVMAHHSENSDGEELSLTNIKALLLNLFTAGTDTSSSIIEWSLAEMLKKPSIMKKAHEEMDQVIGRDRRLKESDIPKLPYFQAICKETYRKHPSTPLNLPRISSEPCQVNGYYIPENTRLNVNIWAIGRDPDVWNNPLEFMPERFLSGKNAKIDPRGNDFELIPFGAGRRICAGTRMGIVLVHYILGTLVHSFDWKLPNGERELDMEESFGLALQKKVPLAALVTPRLNPSAYIS

SEQ ID NO: 498 - protein, 187 aa, Glycine max
MASCLPNASPFLVMLAMCLLISTSEAEKYVVGGSEKSWKFPLSKPDSLSHWANSHRFKIGDTLIFKYEKRTESVHEGNETDYEGCNTVGKYHIVFNGGNTKVMLTKPGFRHFISGNQSHCQMGLKLAVLVISSNKTKKNLLSPSPSPSPPPSSLLSPSPSPLPNNQGVTSSSGAGFIGVMMWLMLLL

SEQ ID NO: 499 - protein, 105 aa, Glycine max
MAKGNSPLERPSLASLDQKLAFAKRCSHEGVLAGAKAAVVASVASAIPTLASVRMLPWARANLNHTAQALIISTATAAAYFIVADKTVLATARKNSFNQPSNSEA

SEQ ID NO: 500 - protein, 987 aa, Glycine max
MRSCVCYTLLLFIFFIWLRVATCSSFTDMESLLKLKDSMKGDKAKDDALHDWKFFPSLSAHCFFSGVKCDRELRVVAINVSFVPLFGHLPPEIGQLDKLENLTVSQNNLTGVLPKELAALTSLKHLNISHNVFSGHFPGQIILPMTKLEVLDVYDNNFTGPLPVELVKLEKLKYLKLDGNYFSGSIPESYSEFKSLEFLSLSTNSLSGKIPKSLSKLKTLRYLKLGYNNAYEGGIPPEFGSMKSLRYLDLSSCNLSGEIPPSLANLTNLDTLFLQINNLTGTIPSELSAMVSLMSLDLSINDLTGEIPMSFSQLRNLTLMNFFQNNLRGSVPSFVGELPNLETLQLWDNNFSFVLPPNLGQNGKLKFFDVIKNHFTGLIPRDLCKSGRLQTIMITDNFFRGPIPNEIGNCKSLTKIRASNNYLNGVVPSGIFKLPSVTIIELANNRFNGELPPEISGESLGILTLSNNLFSGKIPPALKNLRALQTLSLDANEFVGEIPGEVFDLPMLTVVNISGNNLTGPIPTTLTRCVSLTAVDLSRNMLEGKIPKGIKNLTDLSIFNVSINQISGPVPEEIRFMLSLTTLDLSNNNFIGKVPTGGQFAVFSEKSFAGNPNLCTSHSCPNSSLYPDDALKKRRGPWSLKSTRVIVIVIALGTAALLVAVTVYMMRRRKMNLAKTWKLTAFQRLNFKAEDVVECLKEENIIGKGGAGIVYRGSMPNGTDVAIKRLVGAGSGRNDYGFKAEIETLGKIRHRNIMRLLGYVSNKETNLLLYEYMPNGSLGEWLHGAKGGHLKWEMRYKIAVEAAKGLCYLHHDCSPLIIHRDVKSNNILLDGDLEAHVADFGLAKFLYDPGASQSMSSIAGSYGYIAPEYAYTLKVDEKSDVYSFGVVLLELIIGRKPVGEFGDGVDIVGWVNKTRLELAQPSDAALVLAVVDPRLSGYPLTSVIYMFNIAMMCVKEMGPARPTMREVVHMLSEPPHSATHTHNLINL

SEQ ID NO: 501 - protein, 321 aa, Glycine max
MGLTGAYNDPLQEQDGISVIKYAFSKGITFFDTADVYGANANELLVGKALKQLPREKIQIATKFGIASRGFPDMKIKGSPEYVRSCCEASLKRLDVEYIDLYYQRRVDTSVPIEETVGELKKLVEEGKVKYIGLSEASPDTIRRAHAIHPITAVQIEWSLWTRDIEEEIVPLCRELGIGIVPYSPLGRGFFGGKGVVENVPTNSSLKAHPRFQAENLDKNKNIYERIEGLAKKHQATPAQLALAWVLQQGEDVVPIPGTTKIKNLDQNIGALAVKLSEKDLREISEAVPIGDVAGGRYYNGLDHFSWKYANTPPKDSKIST

SEQ ID NO: 502 - protein, 190 aa, Glycine max
MRYLSLSTFSLLCITFVVMAASVDPLVVGRVIGDVVDMFIPSVNMSVYFGSKHVTNGCDIKPSIAISPPKLALTGNMDNLYTLVMTDPDAPSPSEPSMREWIHWILVDIPGGTNPFRGKEIVSYVGPRPPIGIHRYIFVLFQQKGPLGLVEQPPTRASFNTRYFARQLDLGLPVATVYFNSQKEPTVKRR

SEQ ID NO: 503 - protein, 1187 aa, Glycine max
MKALYRSSLLLLLLLFISVCFASSSSPVTQQLLSFKNSLPNPSLLPNWLPNQSPCTFSGISCNDTELTSIDLSSVPLSTNLTVIASFLLSLDHLQSLSLKSTNLSGPAAMPPLSHSQCSSSLTSLDLSQNSLSASLNDMSFLASCSNLQSLNLSSNLLQFGPPPHWKLHHLRFADFSYNKISGPGVVSWLLNPVIELLSLKGNKVTGETDFSGSISLQYLDLSSNNFSVTLPTFGECSSLEYLDLSANKYLGDIARTLSPCKSLVYLNVSSNQFSGPVPSLPSGSLQFVYLAANHFHGQIPLSLADLCSTLLQLDLSSNNLTGALPGAFGACTSLQSLDISSNLFAGALPMSVLTQMTSLKELAVAFNGFLGALPESLSKLSALELLDLSSNNFSGSIPASLCGGGDAGINNNLKELYLQNNRFTGFIPPTLSNCSNLVALDLSFNFLTGTIPPSLGSLSNLKDFIIWLNQLHGEIPQELMYLKSLENLILDFNDLTGNIPSGLVNCTKLNWISLSNNRLSGEIPPWIGKLSNLAILKLSNNSFSGRIPPELGDCTSLIWLDLNTNMLTGPIPPELFKQSGKIAVNFISGKTYVYIKNDGSKECHGAGNLLEFAGISQQQLNRISTRNPCNFTRVYGGKLQPTFNHNGSMIFLDISHNMLSGSIPKEIGAMYYLYILNLGHNNVSGSIPQELGKMKNLNILDLSNNRLEGQIPQSLTGLSLLTEIDLSNNLLTGTIPESGQFDTFPAAKFQNNSGLCGVPLGPCGSEPANNGNAQHMKSHRRQASLAGSVAMGLLFSLFCVFGLIIIAIETRKRRKKKEAALEAYGDGNSHSGPANVSWKHTSTREALSINLATFEKPLRKLTFADLLDATNGFHNDSLIGSGGFGDVYKAQLKDGSVVAIKKLIHVSGQGDREFTAEMETIGKIKHRNLVPLLGYCKVGEERLLVYEYMKYGSLEDVLHDQKKAGIKLNWAIRRKIAIGAARGLAFLHHNCIPHIIHRDMKSSNVLLDENLEARVSDFGMARLMSAMDTHLSVSTLAGTPGYVPPEYYQSFRCSTKGDVYSYGVVLLELLTGKRPTDSADFGDNNLVGWVKQHAKLKISDIFDPELMKEDPNLEMELLQHLKIAVSCLDDRPWRRPTMIQVMAMFKEIQAGSGIDSQSTIANDEEGFNAVEMVEMSIKEAPELSKH

SEQ ID NO: 504 - protein, 296 aa, Glycine max
MMEPQQQQQQAQGSQQQQQNEDGGSGKGGFLSRQSSTRWTPTNDQIRILKELYYNNGIRSPSAEQIQRISARLRQYGKIEGKNVFYWFQNHKARERQKKRFTSDHNHNNVPMQRPPTNPSAAWKPDLADPIHTTKYCNISSTAGISSASSSVEMVTVGQMGNYGYGSVPMEKSFRDCSISAGGSSGHVGLINHNLGWVGVDPYNSSTYANFFDKIRPSDQETLEEEAENIGATKIETLPLFPMHGEDIHGYCNLKSNSYNYDGNGWYHTEEGFKNASRASLELSLNSYTRRSPDYA

SEQ ID NO: 505 - protein, 173 aa, Glycine max
MARMPLEPLIVGRVIGEVLDSFTTSTKMIVSYNKNQVYNGHELFPSTVNTKPKVEIEGGDMRSFFTLIMTDPDVPGPSDPYLREHLHWIVTDIPGTTDATFGKELVSYEIPKPNIGIHRFVFVLFKQKRRQCVTPPTSRDHFNTRKFAAENDLALPVAAVYFNAQRETAARRR

SEQ ID NO: 506 - protein, 175 aa, Glycine max
MPGGSRNPLVVGRVIVEVIDPFEISIPFRVTYGNRDLGNGCELKPSQVANQPRVSVGGDDLRNFYTMVLVDPDAPSPSNPNFREYLHWLVTDIPETTGPNFGNEVVSYESPRPTMGIHRLVFVLFRQQFRQRVYAPGWRQNFNTREFAELYNLGLPVAAVFFNCQRESGSGGRTF

SEQ ID NO: 507 - protein, 468 aa, Glycine max
MVLVLWSRGTKNMDFLTLFTLLLLLFIHTALSSTQYHDGNILLTHRKIFPKQEAITSYAVIFDAGSTGSRVHVFHFDQNLDLLRIGNELEFYDKVTPGLSAYADNPQQAAESLIPLLEEAESVVPEDLYPTTPVKLGATAGLRLLEGDASERILQAVRDLLKNRSTLNTQPDAVAIIDGTQEGSYLWVTINYLLGKLGKRFSKTVGVVDLGGGSVQMAYAISRNTAKNAPKPPDGEEPYIKKLVLKGKEYDLYVHSYLHYGREASRAEILKVTDGSANPCILAGFDGTYTYSGADYKAFAPISGSSYDECREVVLQALKLNESCPHQNCTFGGIWDGGRGSGQKILFGTSSFYYLPTEIGIIDLNKPNSKIHPVDLEIEAKRACETKLEDAKSTYPNLAEDRLPYVCLDIAYQYALYTDGFGLDPWQEITVANEIEYQDALVEAAWPLGTAIEAISSLPKFDRLMYFI

SEQ ID NO: 508 - protein, 361 aa, Glycine max
MRNPSLPTLATTKTKVKNNSNKSTNNNNNIGTNYSPCCNNVGLKRGPWTPEEDEVLANYINKEGEGRWRTLPKRAGLLRCGKSCRLRWMNYLRPSVKRGHIAPDEEDLILRLHRLLGNRWSLIAGRIPGRTDNEIKNYWNTHLSKKLINQGIDPRTHKPLNPPSIAVPSSSTTSTIPPSKPPPVIITNNNINPFHHDLTNMFNQGVHLNHLGQHHQPPPLSNPCDNHNPVPAAATDDVSAMGFMDNNNEDCNNDGININYYSDDVFSSFLNSLINDDAFEAQQQQHHVQTEIPTPSERSINPLPCDDRVDDHHLGSITTASASQGYDDELGVLWESPLVSATFSQHVNDHITKRVHDHHNQ

SEQ ID NO: 509 - protein, 532 aa, Glycine max
MCTLLCLRSTILHHVALIKSFSTTRTKGSPLLSFLLQQLKAKTLLFSLISLAKTILVQLISFSLCTFSCFHKAMKSRPLHIAMYPWLAMGHQTAFLHLCNKLAIRGHKISFITPPKAQAKLEPFNLHPNSITFVTINVPHVEGLPPDAQTTADVTYPLQPQIMTAMDLTKDDIETLLTGLKPDLVFYDFTHWMPALAKRLGIKAVHYCTASSVMVGYTLTPSRFHQGTDLMESDLMEPPEGYPDSSIKLQTHEARTFAAKRKDTFGSNVLFYDRQFIALNEADLLAYRTCREIEGPYMDYIGKQFNKPVVATGPVILDPPTLDLEEKFSTWLGGFEPGSVVYCCFGSECTLRPNQFLELVLGLELTGMPFLAAVKAPLGFETVESAMPEGFQERVKGRGFVYGGWVQQQLILAHPSVGCFITHCGSGSLSEALVNKCQLVLLPNVGDQILNARMMGTNLEVGVEVEKGDEDGMYTKESVCKAVSIVMDCENETSKRVRANHARIRELLLNKDLESSYVDSFCMRLQEIVEGI

SEQ ID NO: 510 - protein, 1123 aa, Glycine max
MSTSRPSQSSSNSGRSRRSARAMALATVDAKLHATFEESGSSFDYSSSVRISGTADGVNQPRHDKVTTAYLHHMQKGKMIQPFGCLLALDEKTCKVIAYSENAPEMLTMVSHAVPSVGDHPALGIGTDIKTLFTAPSASALQKALGFAEVLLLNPVLIHCKTSGKPFYAIIHRVTGSMIIDFEPVKPYEVPMTAAGALQSYKLAAKAITRLQSLPSGSMERLCDTMVQEVFELTGYDRVMAYKFHEDDHGEVIAEITKPGLEPYLGLHYPATDIPQASRFLFMKNKVRMIVDCHAKHVRVLQDEKLPFDLTLCGSTLRAPHSCHAQYMANMDSIASLVMAVVVNDNEEDGDTDAIQPQKRKRLWGLVVCHNTTPRFVPFPLRYACEFLAQVFAIHVNKEIELEYQIIEKNILRTQTLLCDLVMRDAPLGIVSESPNIMDLVKCDGAALIYKNKVWRLGVTPSESQIREIAFWLSEYHMDSTGFSTDSLSDAGFPSALSLGDVVCGMAAVRVTAKDVVFWFRSHTAAEIRWGGAKHEAGEKDDGRRMHPRSSFKVFLDVVKARSLPWKEYEIDAMHSLQLILRNAFKDTESMDLNTKAINTRLSDLKIEGMQELEAVTSEIVRLIETATVPILAVDVDGLVNGWNIKIAELTGLPVGEAMGKHLLTLVEDSSTDRVKKMLNLALLGEEEKNVQFEIKTHGSKMDSGPISLVVNACASRDLRDNVVGVCFVAHDITAQKNVMDKFTRIEGDYKAIVQNRNPLIPPIFGTDEFGWCCEWNPAMTKLTGWKREEVMDKMLLGELFGTHMAACRLKNQEAFVNLGVVLNKAMTGLETEKVPFGFFARNGKYVECLLSVSKKLDVEGLVTGVFCFLQLASPELQQALHIQRLSEQTALKRLNALSYMKRQIRNPLCGIIFSRKMLEGTALGTEQKQLLRTSAQCQQQLSKILDDSDLDSIIDGYLDLEMAEFTLHEVLVTSLSQVMTKSNGKSIRIVNDVAEQIVMETLYGDSLRLQQVLADFLLISINFTPNGGQVVVAGTLTKEQLGKSVHLVKLELSITHGGSGVPEALLNQMFGNNGLESEEGISLLISRKLLKLMNGDVRYLREAGKSAFILSAELAAAHNLKG

SEQ ID NO: 511 - protein, 170 aa, Glycine max
MPLEPLIVGRVIGEVLDSFTTSTKMTVSYNKKQVYNGHELFPSTVNTKPKVEIEGGDMRSFFTLIMTDPDVPGPSDPYLREHLHWIVTDIPGTTDATFGKELVSYEVPKPNIGIHRFVFVLFKQKRRQCVTPPTSRDHFNTRKFAAENDLGLPVAAVYFNAQRETAARRR

SEQ ID NO: 512 - protein, 172 aa, Glycine max
MARENPLVIGGVIGDVLNPFTSSVSLTVSINNRAISNGLELRPSQVVNRPRVTVGGEDLRTFYTLVMVDADAPSPSNPVLREYLHWMVTDIPATTNASFGREVVFYESPNPSVGIHRIVFVLFQQLGRDTVITPEWRHNFNSRNFAEINNLAPVAAAYANCQRERGCGGRRY

SEQ ID NO: 513 - protein, 175 aa, Glycine max
MPSGSRNPLVVGRVIGEVIDPFESSIPFRVTYGNKEVGNGCELKPSQVPNQPRVSIGGDDLRKFYTMVMVDPDAPSPSNPNFREYLHWLVTDIPETTGPNFGNEIVSYESPRPTMGIHRFVFVLFRQQFRQRVYAPGWRQNFNTREFAELYNLGLPVAAVFFNCQRETGSGGRTF

SEQ ID NO: 514 - protein, 346 aa, Glycine max
MNGGATTATFRSILDKPLNQLTEDDISQLTREDCRRFLKEKGMRRPSWNKSQAIQQVISLKALLEPSDDDTPPPPPPAMHHRSHAQPQPQVNLSEPPPPPPKAPPPEEPAFHAAEDIQKSASSGEKPTETNDTNTNVASPKGCATSGSFGQMTIFYCGKVNVYDRVSPDKARAIMQLATSPVQLTQDDPLNGNAAVWTSPCHLPMDKDVLVPVDTTILQVAQADKMVEYPLQYREKGSIARDADVEGQEHRKVSLQRYLEKRKDRGRLKGKKLTGITSSNFEMYLNLPVKVHSSNGNSSRSSTSSPPQPRLPLVSSGSDQLKVALPIDLNDKVSLQMFKNAKIQTR

SEQ ID NO: 515 - protein, 176 aa, Glycine max
MPSGSRDPLVVGGVIGDVLDPFEYSIPMRVTYNNRDVSNGCEFKPSQVVNQPRVNIGGDDLRNFYTLIAVDPDAPSPSDPNLREYLHWLVTDIPATTGASFGHEVVTYESPRPMMGIHRLVFVLFRQLGRETVYAPGWRQNFNTKEFAELYNLGLPVAAVYFNIQRESGSGGRRLY

SEQ ID NO: 516 - protein, 462 aa, Glycine max
MSCEVVNNDELHVVMFPFLAFGHINAFVQLSNKLFSHGVRITFLSAASNIPRIKSTLNLNPAINVIPLYFPNGITSTAELPPNLAANLIHALDLTQPHVKSLLLELKPHYVFFDFAQNWLPKLASELGIKSVRFASFSAISDSYITVPSRLADIEGRNITFEDLKKPPPGYPQNSNISLKAFEAMDLMFLFKRFGEKNFTGYERVLQGFSDCSLIVFRSCKEIEESYLDYIEKQFGKLVLLTGFLVPEPSMDVLEEKWSKWLDSFPAKSVILCSFGSEQFLNDDQIKEVASGLELSGLPFILVLNFPSNLSAKAELERALPKGFLERVKNRGVVHTGWFQQQLVLKHSSVGCHLGHGGFNSVIEALASDCELVLLPFKADQFFNAKLIAKALEAGIEVNRSEDGDFKKEDILKAVKTIMVEDDKEPGKQIKENHMKWKEFLLNKGIQNKFITDLVAQLKSMA

SEQ ID NO: 517 - protein, 311 aa, Glycine max
MSSSPWWSNPSDIRSLLLDSALLPNSVAVDTMFIDIKECLPHIIFPLSVSLSVGTMRPERNPLDLNNLPDEYSRDGKQVLEDHTSSSGCRKKKSGGKDGKDECGKVYECRFCSLKFCKSQALGGHMNRHRQERETETLNQARQLVFRCDHNIAAQGAPHLGCCQTIGTGGYHPSGDPTVPLRFPRYFSGSSSTHMPPSPPPPPPPQRPYLYPSPTRPVSFGSSHFPLQHAVNDYYVGHVMSGGSHGHYVGGESTRSYTCIGAPVGQGGGFAGGKEGSAVQEEGLSTWGRGYSGAQDRLDPPSAINRFQDGF

SEQ ID NO: 518 - protein, 105 aa, Glycine max
MASKFIFTTVVLLMLLCLLLMREPSGCGSAYECFGANAADLRDIPNRKVLSVLKDKKTSALKASLQGSSSNKYGEKPLNWELRKVPSGPDPLHHNGVNPKKPQTP

SEQ ID NO: 519 - protein, 264 aa, Glycine max
MTLSFLYRRPERNPLDLNNLPDEYSRDGKQVLEDHTSSPGCRKKKSGGKDGKDECGKVYECRFCSLKFCKSQALGGHMNRHRQERETETLNQARQLVFRSDHIIAPQGAPHLGCCQPIGTGGYHPSGDPTVPLRFPRYFSGSSSTHMPPPPPPPPPPQQSHLYASPSRPVSFGSSHFPHQHAVNDYYVGHVMSGGSHGHYVGGESTSSYTYIGAPVGQAGGFAGGGKEGSAVQEEGLSWGRSYSGGAQHRLDPPSAINRFHDGF

SEQ ID NO: 520 - protein, 105 aa, Glycine max
MASKFIFTTVVLVMLLCLLLMRDPSGCGSAYECFGANAAGLTDIPNRKVLPVLKDKKTSALKASLRGSSSNKYGEKPLNWELRKVPSGPDPLHHNGVNPKNPQTP

SEQ ID NO: 521 - protein, 805 aa, Glycine max
MATDRLTRVHSLRERLDETLTANRNEILALLSRIEAKGKGILQHHQVIAEFEEIPEENRQKLTDGAFGEVLRSTQEAIVLPPWVALAVRPRPGVWEYLRVNVHALVVEELQPAEYLHFKEELVDGSSNGNFVLELDFEPFNAAFPRPTLNKSIGNGVQFLNRHLSAKLFHDKESLHPLLEFLRLHSVKGKTLMLNDRIQNPDALQHVLRKAEEYLGTVPPETPYSEFEHKFQEIGLERGWGDNAERVLESIQLLLDLLEAPDPCTLETFLGRIPMVFNVVILSPHGYFAQDNVLGYPDTGGQVVYILDQVRALENEMLHRIKQQGLDIVPRILIITRLLPDAVGTTCGQRLEKVFGTEHSHILRVPFRTEKGIVRKWISRFEVWPYLETYTEDVAHELAKELQGKPDLIVGNYSDGNIVASLLAHKLGVTQCTIAHALEKTKYPESDIYWKKLEERYHFSCQFTADLFAMNHTDFIITSTFQEIAGSKDTVGQYESHTAFTLPGLYRVVHGIDVFDPKFNIVSPGADQTIYFPHTETSRRLTSFHPEIEELLYSSVENEEHICVLKDRSKPIIFTMARLDRVKNITGLVEWYGKNAKLRELVNLVVVAGDRRKESKDLEEKAEMKKMYGLIETYKLNGQFRWISSQMNRVRNGELYRVICDTRGAFVQPAVYEAFGLTVVEAMTCGLPTFATCNGGPAEIIVHGKSGFHIDPYHGDRAADLLVDFFEKCKLDPTHWDKISKAGLQRIEEKYTWQIYSQRLLTLTGVYGFWKHVSNLDRRESRRYLEMFYALKYRKLAESVPLAAE

SEQ ID NO: 522 - protein, 174 aa, Glycine max; identical to SEQ ID NO: 457

SEQ ID NO: 523 - protein, 245 aa, Glycine max
MRALTSSSSTFIPKRYSFFFFLSILFALRSSSGGCSEYHHHHAPMATIGGLRDSQGSQNSVQTEALARFAVDEHNKKQNSLLEFSRVVRTQEQVVAGTLHHLTLEAIEAGEKKLYEAKVWVKPWLNFKELQEFKPAGDVPSFTSADLGVKKDGHQPGWQSVPTHDPQVQDAANHAIKTIQQRSNSLVPYELHEVADAKAEVIDDFAKFNLLLKVKRGQKEEKFKVEVHKNNQGGFHLNQMEQDHS

SEQ ID NO: 524 - protein, 511 aa, Glycine max
MANIDIEGILKQQQPYDGRVPKTKIVCTLGPASRSVEMTEKLLRAGMNVARFNFSHGTHDYHQETLNNLKTAMHNTGILCAVMLDTKGPEIRTGFLKDGKPIQLKEGQEVTITTDYDIKGDPEMISMSYKKLPVHLKPGNTILCSDGTITLTVLSCDPDAGTVRCRCENTATLGERKNVNLPGVVVDLPTLTEKDKEDILGWGVPNKIDMIALSFVRKGSDLVNVRKVLGPHAKNIQLMSKVENQEGVLNFDEILRETDAFMVARGDLGMEIPVEKIFLAQKMMIYKCNLVGKPVVTATQMLESMIKSPRPTRAEATDVANAVLDGTDCVMLSGESAAGAYPELAVKIMARICIEAESSLDYGAIFKEMIRSTPLPMSPLESLASSAVRTANKAKAKLIVVLTRGGSTAKLVAKYRPAVPILSVVVPVLSTDSFDWTCSDETPARHSLIYRGLIPILGEGSAKATDAESTEVILEAALKSATERALCKPGDAVVALHRIGAASVIKICIVK

SEQ ID NO: 525 - protein, 411 aa, Glycine max
MALRLNPIPTQTFSLPQMASLRSPRFRMASTLRSGSKEVENIKKPFTPPREVHVQVTHSMPPQKIEIFQSLEDWAEENILAHLKPVEKCWQPQDFLPDPSSDGFEEQVKELRERAKELPDDYFVVLVGDMITEEALPTYQTMLNTLDGVRDETGASLTSWAIWTRAWTAEENRHGDLLNKYLYLSGRVDMKQIEKTIQYLIGSGMDPRTENSPYLGFIYTSFQERATFISHGNTARLAKEHGDIKLAQICGMIASDEKRHETAYTKIVEKLFESDPDGTVMAFADMMRKKIAMPAHLMYDGRDDNLFDNYSSVAQRIGVYTAKDYADILEFLVGRWKVEQLTGLSGEGRKAQEYICGLPPRIRRLEERAQARVKESSTLKFSWIHDRESTTLNAPREEHGEIFRQYRSEKC

SEQ ID NO: 526 - protein, 667 aa, Glycine max
MAGSWARRSLIVLAIISFGCLFAISIAKEEATKLGTVIGIDLGTTYSCVGVYKNGHVEIIANDQGNRITPSWVAFTDSERLIGEAAKNQAAVNPERTIFDVKRLIGRKFEDKEVQKDMKLVPYKIVNKDGKPYIQVKIKDGETKVFSPEEISAMVLIKMKETAEAFLGKKINDAVVTVPAYFNDAQRQATKDAGVIAGLNVARIINEPTAAAIAYGLDKKGGEKNILVFDLGGGTFDVSILTIDNGVFEVLATNGDTHLGGEDFDQRIMEYFIKLIKKKHGKDISKDNRALGKLRREAERAKRALSSQHQVRVEIESLFDGVDFSEPLTRARFEELNNDLFRKTMGPVKKAMEDAGLQKSQIDEIVLVGGSTRIPKVQQLLKDYFDGKEPNKGVNPDEAVAYGAAVQGSILSGEGGEETKDILLLDVAPLTLGIETVGGVMTKLIPRNTVIPTKKSQVFTTYQDQQTTVSIQVFEGERSLTKDCRLLGKFDLSGIPPAPRGTPQIEVTFEVDANGILNVKAEDKGTGKSEKITITNEKGRLSQEEIDRMVREAEEFAEEDKKVKERIDARNSLETYVYNMKNQVSDKDKLADKLESDEKEKIETAVKEALEWLDDNQSVEKEDYEEKLKEVEAVCNPIISAVYQRSGGAPGGAGGEGEDEDDSHDEL

SEQ ID NO: 527 - protein, 97 aa, Glycine max
MAALGGNRDVTGSQNSVEIDALARFAVEEHNKKQNALLEFEKVVTAKQQVVSGTLYTITLEAKDGGQKKVYEAKVWEKSWLNFKEVQEFKLVGDAPA

SEQ ID NO: 528 - protein, 814 aa, Glycine max
MTGNEFRFFLSCDISVPVTFRVERLEGNLPLPNPKSPDLETNAPTENRTKELFVECALYIDGAPFGLPTRTRLESSGPSYCWNELITLTTKYRDLTAQSQLTFTVWDLSHGEGLIGGATILLFNNKKQLKTGKQKLRLWAGKEADGTFPTSTPGKVPRHERGELERLEKLVNKYERGQIQRVDWLDRLTFKTMERIKERESLKNGSSHLYLVVDFCSFEHRVVFQESGANFLFPSPIASTNDIVVVWDPEVGKINPSEHKQLKLARSLTRGVIDRDLKPSSNERKSIQRILKYPPTRTLSGDERQLLWKFRFSLMSEKRALTKFLRCVEWSDVQEAKQALELMGKWEMIDVCDALELLSPVFESEEVRAYAVSVLERADDEELQCYLLQLVQALRFERSDKSRLSHFLVQRALRNIELASFLRWYVAVELYDPAYAKRFYCTYEILEENMMKIAAGVNGEEDGFKQWQSLVRQTELTAQLCSITREVRNVRGNTQKKIEKLRQLLSGLLSELTYFDEPIRSPLAPGVLIAGIVPSESSIFKSALHPLRLSFRTANGGTCKIIFKKGDDLRQDQLVVQMVSLMDRLLKLENLDLHLTPYKVLATGQDEGMLEFIPSRSLAQILSENRSIISYLQKFHPDDHGPFGITATCLETFIKSCAGYSVITYILGIGDRHLDNLLLRNDGGLFHVDFGFILGRDPKPFPPPMKLCKEMVEAMGGAESQYYTRFKSYCCEAYNILRKSSNLILNLFYLMAGSNIPDIASDPEKGILKLQEKFRLDLDDEASIHFFQDLINESVSALFPQMVETIHRWAQYWR

SEQ ID NO: 529 - protein, 341 aa, Glycine max
MCEHLLVSLSCYIWVRTQRIVEFNEMEQIKHRTVEVNGIKMHVAEKGEGPVVLFLHGFPELWYSWRHQILSLSSLGYRAVAPDLRGYGDTEAPPSISSYNCFHIVGDLVALIDSLGVQQVFLVAHDWGAIIGWYLCMFRPDKVKAYVCLSVPLLRRDPNIRTVDGMRALYGDDYYVCRFQKPGEMEAQMAEVGTEYVLKNILTTRNPGPPILPKGRFQFNPEMPNTLPSWLTEEDLAYYVSKFEKTGFTGPLNYYRNFNLNWELTAPWTGGQIKVPVKYITGELDMVYNSLNLKEYIHGGGFKQDVPNLEQVIVQKGVAHFNNQEAAEEIDNYIYDFINKF

SEQ ID NO: 530 - protein, 476 aa, Glycine max
  MOD_RES (210)..(210): Any amino acid
MDLQQRPLKLHFIPYLSPGHVIPLCGIATLFASRGQHVTVITTPYYAQILRKSSPSLQLHVVDFPAKDVGLPDGVEIKSAVTDLADTAKFYQAAMLLRRPISHFMDQHPPDCIVADTMYSWADDVANNLRIPRLAFNGYPLFSGAAMKCVISHPELHSDTGPFVIPDFPHRVTMPSRPPKMATAFMDHLLKIELKSHGLIVNSFAELDGXECIQHYEKSTGHKAWHLGPACLVGKRDQERGEKSVVSQNECLTWLDPKPTNSVVYVSFGSVCHFPDKQLYGIACALEQSGKSFIWIVPEKKGKEYENESEEEKEKWLPKGFEERNREKGMIVKGWAPQLLILAHPAVGGFLSHCGWNSSLEAVTAGVPMITWPVMADQFYNEKLITEVRGIGVEVGATEWRLVGYGEREKLVTRDTIETAIKRLMGGGDEAQNIRRRSEELAEKAKQSLQEGGSSHNRLTTLIADLMRLRDSKSAT

SEQ ID NO: 531-534 - skipped (4 entries)

SEQ ID NO: 535 - protein, 182 aa, Glycine max
MCKKLVQMMQGNIWISPNSLGLVQGMTLLLKFQIGPSLGKSIFAPKDYSSSQFRGLKVLLAEDDGVNRTVTKKLLEKLGCQVIAVSSGFECLSAISGAGNSFRIILLDLHMPEMDGFELAKRIRKFHSRSWPLIIALITSAEEHVREKCLLAGMNGLIQKPIVLHQIADELRTVLQRAGEKL

SEQ ID NO: 536 - protein, 409 aa, Glycine max
MDWGLAISSHPKPYSVTTGGNLWRSKHTTKNIYFASSWISKASRHKRETQIEHNVLRFQQPSLDHHYKCIRGGSTYQECNRKFVVKAISKQPLGFEAHASNPKNILDSVKNVLSAFYWFSYPYTMIGITLCAFSSSLLAVEKLSDISLSFLIGVLQGVLPQLFIEIYLCGVNQLYDLEIDKINKPHLPMASGQFSFKTGVIISAAFLALSFGFTWITGSWPLICNLVVIASSWTAYSIDVPLLRWKRYPFVAAMCMISTWALALPISYFHHMQTVVLKRPIGFPRSLGFLVAFMTFYSLGLALSKDIPDVEGDKEHGIDSFAVRLGQKRAFWICVSFFEMAFGVGILAGASCSHFWTKIFTGMGNAVLASILWYQAKSVDLSDKASTGSFYMFIWKLLYAGFFLMALIR

SEQ ID NO: 537 - protein, 586 aa, Glycine max
MHIGTPTRTSPTSESPILKMDDAHKATTSNFTRAFGGRSFTGITMGSMEMEFFSDYGDVSRYKIQEVIGKGSYGVVCSAIDTHTGEKVAIKKIHDIFEHVSDAARILREIKLLRLLRHPDIVEIKHVMLPPSRRDFKDIYVVFELMESDLHQVIKANDDLTKEHYQFFLYQLLRALKYIHTANVYHRDLKPKNILANANCKLKICDFGLARVAFNDTPTTVFWTDYVATRWYRAPELCGSFYSRFYFVSADELTVRNDKARRYLTSMRKKQPIPFAQKFPNADPLALRLLERLLAFDPKDRPTAEEALADPYFKGLSKIEREPSCQPITKMEFEFERRRVTKEEIGELIFREILDAVDQFKQQFSHLEENGGKSYPIMPLERKHASLPRSTMVHSNMVPSKEQSNIASCINRQTTGEFNNNSRDTESPAPRSIPGLQKFSQAKPGKVVGPVIPYEYASVVKGTYDPRTFMRGSVLPSQPILPTNHYQRSTSGKQERSATEADKGVSLQSKLAQQCGVNAKIAPDTAINIDTNPFFMTRAGVNKIEQDDRIAIETKLLQSKAHQYGGISTTAHRKVGPVQYGMTRLF

SEQ ID NO: 538 - protein, 198 aa, Glycine max
MLAKAHNKGDGSKSLAKILAKWKEYNAQIDSSSDADKPIRKVPAKGSKKGCMKGKGGPENSRCNYRGVRQRTWGKWVAEIREPNRGNRLWLGTFPTAIGAALAYDEAARAMYGSCARLNFPNVSVSSFSEESSKDSPSANHCGSSMAVSANESMISPSNSGVDAEEDVDMEPISLSLSVKHENGEGESGISSSPPSSS

SEQ ID NO: 539 - protein, 178 aa, Glycine max
MASSMISSPAVTTVNRAGAGMVAPFTGLKSMAGFPTRKTNNDITSIASNGGRVQCMQVWPPIGKKKFETLSYLPDLDDAQLAKEVEYLLRKGWIPCLEFELEHGFVYREHNRSPGYYDGRYWTMWKLPMFGCTDASQVLKELQEAKTAYPNGFIRIIGFDNVRQVQCISFIAYKPPGF

SEQ ID NO: 540 - protein, 524 aa, Glycine max
MGMRTKLSLAIFFFFLLALFSNLAFGKCKETEVEEEDPELVTCKHQCQQQQQYTEGDKRVCLQSCDRYHRMKQEREKQIQEETREKKEEESREREEEQQEQHEEQDENPYIFEEDKDFETRVETEGGRIRVLKKFTEKSKLLQGIENFRLAILEARAHTFVSPRHFDSEVVFFNIKGRAVLGLVSESETEKITLEPGDMIHIPAGTPLYIVNRDENDKLFLAMLHIPVSVSTPGKFEEFFAPGGRDPESVLSAFSWNVLQAALQTPKGKLENVFDQQNEGSIFRISREQVRALAPTKKSSWWPFGGESKPQFNIFSKRPTISNGYGRLTEVGPDDDEKSWLQRLNLMLTFTNITQRSMSTIHYNSHATKIALVIDGRGHLQISCPHMSSRSSHSKHDKSSPSYHRISSDLKPGMVFVVPPGHPFVTIASNKENLLMICFEVNARDNKKFTFAGKDNIVSSLDNVAKELAFNYPSEMVNGVFLLQRFLERKLIGRLYHLPHKDRKESFFFPFELPREERGRRADA

SEQ ID NO: 541 - protein, 540 aa, Glycine max; identical to SEQ ID NO: 485

SEQ ID NO: 542 - protein, 307 aa, Glycine max
MAAKSKILVIGGTGYIGKFIVKASAETGHPTFVLVRDNTLSHPEKSKLVESFKSFGVTLLYGDLTDHDSLVKAIKQVDVVISALGGQQIDDQVKIIAAIKEAGNIKRFLPSEFGLDVDHHNAVEPVSSFFEKKVKIRRAIEAERIPYTYITSNLFAGHFLPNLLQQNVTTPPRDKVVILGDGNVKGVYVIEEDVATYTIKAVEDPRTLNKTVYVRPPANILTFNELVSLWEYKINSTLDKIYIPDDQLLKSIQESPFPDNFMLALRHSFLVKGDCNYEIDPSFGVEASKLYSEVKYTTVDNYLNAFV

SEQ ID NO: 543 - protein, 740 aa, Glycine max
MESCNCIDPQVPADDLLMKYQYISDFFIALAYFSIPLELIYFVKKSAVFPYRWVLVQFGAFIVLCGATHLINLWTFRIHSRTVAVVMTTAKVLTAVVSCATALMLVHIIPDLLSVKTRELFLKNKAAELDREMGLIRTQEETGRHVRMLTHEIRSTLDRHTILKTTLVELGRTLALEECALWMPTRTGLELQLSYTLRQQNPVGYTVPIHLPVINQVFSSNRAVKISPNCPVARLRPYAGKYMPGAVVAVRVPLLHLSNFQIYDWPEVSTRSYALMVLMLPSDSARQWHVHELELVEVVADQVAVALSHAAILEESMRARDQLMEQNVALDLARREAETAIRARNDFLAVMNHEMRTPMHAVIALSSLLQETDLTAEQRLMVETILKSSNLLATLINDVLDLSRLEDGSLQLEATTFNLHSLFREVLNLIKPVASVKKLSLTSHIASDLPMYAIGDEKRLMQTILNVVGNAVKFSKEGCISISAFVAKPESFRDARIPDFLPVLSDNHFYLRVQVKDSGSGINPQDIPKIFTKFAQNQSLTTRNPAGSGLGLAICRRFVNLMEGHIWVESEGIGKGCTVTFIVKLGIPDRSNEFKLPFVPKVPGNHGSTNFAGLKVLVTDDNGVSRTVTKGLLMHLGCDVTTASSSEECLRVVSLEHEVVFMDVCAGLDGYELAIRIHEKFTKHQDRPLIVALTGNTKKVTKENCMRVGMDGLILKPVSVDKMRGVLSELLERRVLFETV

SEQ ID NO: 544 - protein, 600 aa, Glycine max
MAPLNKVLLLLTLLFLAVDAKYKNKKDKKNSVFHKIPKFPKFPVPIIGGDQKVVVDGGNNAIAKPDFETNNLGHWELINKQSGVSAMQINLMPNNKMLVYDATVYRTSRLPYPKGMPCVQWVDDNLKQSKEDCFAHSMEYDIETNQVRALTVKTDPWCSCGGLTPDGTLVVAGGFADGGKTSRYYGGQPDCQDCDWREYPNKLQEPRWYATQAILANGEYIVIGGRRSFSYEFFPKEGQPSDKPIFFPFLYETSDIDENNLYPFVHLSSDGNLFIFANNRSLLLNPTTNKVVRTYPVLPGGSRNYPASGMSSILPIKLDGTELSSASIKVEVLVCGGNSHDSFILAETEKIFKPAIKDCSRMVITDPDPKWDSEEMPSGRTMGDSLVLPNGQILFINGAQKGTAAWWDADEPNFTPVLYFSEKPKGQRFKVLKPSQIARMYHSTSAVLPSGKIWVGGSNTHDTYKDKDRFPTETRIEAFSPPYLDPKLDKYRPQIVEESSEKKLMYGKNFETQFKLQDTNQKLTKQDIKVSMYFPPFTTHGYSMNQRLLFLKTFIAQNSEGTYKVTSKAPTFREVAPPGYYLLFIVHRGVPSKGMWVQIG

SEQ ID NO: 545 - protein, 540 aa, Glycine max
MQRSGYGSDGIYRSLRPSIVFPKNSNLSLVSHLFNRVAAFPSKPALIDADSSETLSFAELKLLTVRVAHGLLRLGVTKNDVVLFLAPNDIRYIVCFLAVASLGAAVTTVNPAYTAAEVSKQANDSKPKLLVTVAELWDKLEHLKLPAVFLRCSNAPHAPSSATSFDALVQLAGSVTEFPEIKIKQSDTAALLYSSGTTGLSKGVVLTHGNFVAASLMIGFDDDLAGVLHSVFLCVLPMFHVFGLMVISYGQLQRGSAVVSLKKFEFELVLKTIEKFKVTHLWVVPPIILALAKHGLVDKYDLSSLKHIGSGAAPLGKELMKECAKRFPHAIVSQGYGMTETCGIVSVENARMGIRNSGSTGMLVAGMEAQVVSVDTLKPLPPGQLGEIWVRGPNMMQGYHNNPQATRLTMDKKGWVHTGDLGYFDEDGQLFVVDRIKELIKYKGFQVAPAELEGLLVSHAEILDAVVIPYPDAEAGEVPVAYVVRSPNSSLTEEDVQKFIAKQVAPFKRIRRVTFINAVPKTASGKILRRELIEKVRSKI

SEQ ID NO: 546 - protein, 584 aa, Glycine max
MKRDHRDSCGGGGGGSVKGECSSMPSNGKANMWEEQQQQQQGMDELLAALGYKVRASDMADVAQKLEQLEMVMGCAQEEGISHLASDTVHYDPTDLYSWVQTMLTELNPEPNNNNNSLLGPSSLLIDNNTAPVFNDDSEYDLRAIPGIAAYPPPPPQDNNNNNNNLDEIETANNINKRLKPSPVESADSASEPTRTVLLVDHQEAGVRLVHTLLACAEAVQQENLKLADALVKHVGILAASQAGAMRKVASYFAQALARRIYGIFPEETLDSSFSDVLHMHFYESCPYLKFAHFTANQAILEAFATAGRVHVIDFGLRQGMQWPALMQALALRPGGPPTFRLTGIGPPQPDNTDALQQVGWKLAQLAQNIGVQFEFRGFVCNSLADLDPKMLEIRPGEAVAVNSVFELHRMLARPGSVDKVLDTVKKIKPKIVTIVEQEANHNGPGFLDRFTEALHYYSSLFDSLEGSSSSTGLGSPNQDLLMSELYLGRQICNVVANEGADRVERHETLSQWRGRLDSAGFDPVHLGSNAFKQASMLLALFAGGDGYRVEENNGCLMLGWHTRPLIATSAWKLPSPNDLHCKL

SEQ ID NO: 547 - protein, 2260 aa, Glycine max
MADIGRRNGYANSVLPNRPPAAISEVDEFCNALGGNRPIHSILIANNGMAAVKFIRSVRSWAYETFGSEKAILLVAMATPEDMRINAEHIRIADQFVEVPGGTNNNNYANVQLILEMAEITHVDAVWPGWGHASENPELPDALKAKGIVFLGPPAISMAALGDKIGSSLIAQAAEVPTLPWSGSHVKIPPESSLITIPDEIYREACVYTTEEAVASCQVVGYPAMIKASWGGGGKGIRKVHNDDEVRALFKQVQGEVPGSPIFIMKVASQSRHLEVQLLCDQYGNVAALHSRDCSVQRRHQKIIEEGPITVAPIETVKKLEQAARRLAISVNYVGAATVEYLYSMETGEYYFLELNPRLQVEHPVTEWIAEINLPAAQVAIGMGVPLWQIPEIRRFYGVEHGGGYDAWRKTSVLATPFDFDKAQSTRPKGHCVAVRVTSEDPDDGFKPTSGKVQELNFKSKPNVWAYFSVKSGGGIHEFSDSQFGHVFAFGESRALAIANMVLGLKEIQIRGEIRTNVDYTIDLLNASDYRENKIHTGWLDSRIAMRVRAERPAWYLSVVGGALYKASASSAALVSDYVGYLEKGQIPPKHISLVHSQVSLNIEGSKYTIDMIRGGSGSYRLRMNQSEIEAEIHTLRDGGLLMQLDGNSHVIYAEEEAAGTRLLIDGRTCLLQNDHDPSKLVAETPCKLLRYLVADDSHVDADTPYAEVEVMKMCMPLLSPASGIIHFKMSEGQAMQAGELIARLDLDDPSAVRKAEPFTGSFPVLGPPTAISGKVHQKCAASLNAARMILSGYEHNIDEVVQSLLNCLDSPELPFLQWQECLAVLATRLPKELKNELESKYKEFEGISSSQIVDFPAKLLKGIIEAHLSSCPDKEKGAQERLVEPLLSLVKSYEGGRESHAHIIVQSLFDEYLSVEELFSDNIQADVIERLRLQYKKDLLKIVDIVLSHQGIKSKNKLILQLMDKLVYPNPVAYRDQLIRFSLLNHTNYSELALKASQLLEQTKLSELRSNIARSLSELEMFTEDGENIDTPKRKSAINDRMEDLVSAPFAVEDALVGLFDHSDHTLQRRVVESYIRRLYQPYLVKGSARMQWHRSGLIATWEFYDEYIERKNGVEDQSLSKTVEEKHSEKKWGVMVIIKSLQFLPAIITAALREATNNPHEALTSGSVEPVNYGNMMHIGLVGINNQMSLLQDSGDEDQAQERINKLAKILKEQEVGSTIRAAGVGVISCIIQRDEGRAPMRHSFHWSEEKLYYAEEPLLRHLEPPLSIYLELDKLKAYENIRYTPSRDRQWHLYTVVDHKPQPIQRMFLRTLVRQPTTNEGFSSYQRLDAETSRTQLAMSFTSRSIFRSLMAAMEELELNAHNVNIKSEHAHMYLYIIREQQIDDLVPYPKRINIEAGKEEITVEAVLEELAREIHSSVGVRMHRLGVVVWEIKLWMAACGQANGAWRVIVNNVTGHTCTVHLYREKEDTITHKVVYSSVSVKGPLHGVAVNENYQPLGVIDRKRLSARKNSTTYCYDFPLAFETALEQSWAIQQPGFQRAKDKNLLKVTELKFADKEGSWGTPLVPVENYPGLNDVGMVAWFMEMCTPEFPSGRTILVVANDVTFKAGSFGPREDAFFRAVTDLACTKKLPLIYLAANSGARLGVAEEVKSCFRVGWSEESNPENGFQYVYLTPEDNARIGSSVIAHELKLESGETRWVIDTIVGKEDGLGVENLSGSGAIAGAYSRAYKETFTLTYVTGRTVGIGAYLARLGMRCIQRLDQPIILTGFSALNKLLGREVYSSHMQLGGPKIMATNGVVHLTVSDDLEGVSSILKWLSYIPSHVGGALPIVKPLDPPERPVEYFPENSCDPRAAISGTLDGNGRWLGGIFDKDSFVETLEGWARTVVTGRAKLGGIPVGVVAVETQTVMQIIPADPGQLDSHERVVPQAGQVWFPDSATKTAQAILDFNREELPLFILANWRGFSGGQRDLFEGILQAGSTIVENLRTYKQPIFVYIPMMGELRGGAWVVVDSRINSDHIEMYADRTAKGNVLEPEGMIEIKFRTRELLESMGRLDQQLITLKAKLQEAKSSRNIVAFESLQQQIKSRERQLLPVYTQIATKFAELHDTSLRMAAKGVIREVLDWRNSRSVFYQRLHRRIGEQSLINSVRDAAGDQLSHASAMNLLKEWYLNSDIAKGREDAWLDDEAFFRWKDIPSNYENKLKELRVQKVLLQLTNIGDSALDLQALPQGLAALLSKLEPLGRVKLTDELRKVLG

SEQ ID NO: 548 - protein, 649 aa, Glycine max
MAGKGEGPAIGIDLGTTYSCVGVWQHDRVEIIANDQGNRTTPSYVAFTDTERLIGDAAKNQVAMNPINTVFDAKRLIGRRFSDASVQSDMKLWPFKVIPGPADKPMIVVNYKGDEKQFSAEEISSMVLIKMKEIAEAYLGSTIKNAVVTVPAYFNDSQRQATKDAGVISGLNVMRIINEPTAAAIAYGLDKKATSSGEKNVLIFDLGGGTFDVSLLTIEEGIFEVKATAGDTHLGGEDFDNRMVNHFVQEFKRKNKKDISGNARALRRLRTACERAKRTLSSTAQTTIEIDSLYEGIDFYTTITRARFEELNMDLFRKCMEPVEKCLRDAKMDKSTVHDVVLVGGSTRIPKVQQLLQDFFNGKELCKSINPDEAVAYGAAVQAAILSGEGNEKVQDLLLLDVTPLSLGLETAGGVMTVLIPRNTTIPTKKEQVFSTYSDNQPGVLIQVYEGERTRTRDNNLLGKFELSGIPPAPRGVPQITVCFDIDANGILNVSAEDKTTGQKNKITITNDKGRLSKEEIEKMVQEAEKYKAEDEEHKKKVEAKNTLENYAYNMRNTIKDDKIASKLSADDKKKIEDAIEQAIQWLDGNQLAEADEFEDKMKELESICNPIIAKMYQGAGGDAGGAMDEDGPAAGSGSGAGPKIEEVD

SEQ ID NO: 549 - protein, 514 aa, Glycine max
MGNRMNAIVLCLLVSTLLVSAVYCAPNAGLRRIGLKKIKLDPKNRLAARVGSKDVDSFRASIRQFHLQNNFGGTEETDIVALKNYLDAQYYGEIAIGTSPQKFAVIFDTGSSNLWVPSSKCTFSVACYFHAKYKSSKSSTFKKNGTAAAIQYGTGAISGFFSYDSVRVGEIVVKNQEFIEATREPGVTFLAAKFDGILGLGFQEISVGNAAPVWYNMVDQGLLKEPVFSFWFNRNPEEEEGGEIVFGGVDPAHYKGKHTYVPVTRKGYWQFDMGDVLIGGKPTGYCANGCSAIADSGTSLLAGPTTVITMINHAIGASGVMSQECKTIVAEYGQTILDLLLAETQPKKICSRIGLCAFDGTHGVDVGIKSVVDENERKSLGGHHGAACPACEMAVVWMQNQLSRNQTQDQILSYINQLCDKMPSPMGESAVDCGNISSLPVVSFTIGGRTFDLSPEEYVLKVGEGPVAQCISGFTAIDIPPPRGPLWILGDVFMGRYHTVFDFGKLRVGFADAA

SEQ ID NO: 550 - protein, 1131 aa, Glycine max
MSTSRPSQSSSNSRRSRHSARMAQATVDAKIHATFEESGSSFDYSSSVRVSGTADGVNQPRSDKVTTAYLRGKMIQPFGCLLAIDEKNHMQTCKVIAYSENEPEMLTMVSHAVPSVGDHPALGIGTDIKTLFTAPSVSGLQKALGCADVSLLNPILVHCKTSGKPFYAIVHRVTGSLIVDFEPVKPYEVPMTAAGALQSYKLAAKAITRLQSLPSGNMERLCDTMVQEVFELTGYDRVMAYKFHEDDHGEVIREITKPCLEPYLGLHYPATDIPQASRFLFRKNKVRMIVDCHAKHVRVLQDEKLQFDLILCGSTLRAPHSCHAQYMANMDSIASLVLAVVVNDNEEDGDTDAVQPQKTERLWGLVVCHNTTPRFVPFPLRYAREFLPQVFADHVHKEIELEYQIIEKNILHHPGHLLCMLMRDAPLGIASESPNIMDLVKCDGAALIYRNKVWRLGVTPSEPQIREIALWLSEYHMDSTSFSTDSLFDAGFPSALSLGDVVCGMASVRVTAKDMVFWFRSHTAAEIRWGGAKHEAGEKDDSRRMHPRSSFKAFLEVVKARSLPWKEYEMDAIHSLQIILRNAFKEDTESLDLNAKAINTRLRDLKIEGINDLKIERMQELEAVTSEIVRLDYTATVPILAVDVDGLVNGWNIKIAELTGLPIGEATGKHLLTLVEDSSTDRVKKMLNLALLGEEEKNVQFEIKTLGSKMDSGPISLVVNRCASRDLRDNVVGVCFVAHDITAQKNVMDKFIRIEGDYKAIVQNRNPLIPPIFGTDEFGWCCEWNPAMMKLTGWKREEVMDKMLLGEIFGTQMAACRLKNQEAFVNLGVVLNKAMTGSETEKVPFGFFARNGKYVECLLSVSKKLDVEGLVTGVFCFLQLASPELQQALHIQRLSEQTASKRLNALSYMKRQIRNPLCGIVFSRKMLEGTDLGTEQKQLLRTSAQCQQQLSKILDDSDLDTIIDGYLDLEMAEFTLHEVLVTSLSQVMEKSNGKSIRIVNDVAGHIMMETLYGDSLRLQQVLADFLLISINFTPNGGQVVVAGSLTKEQLGKSVHLVKLELSITHGGSGVPEVLLNQMFGNNGLESEEGISLLIRAKLLKLMNGDVRYLREAGKSAFILSAELAAAHNLKA

SEQ ID NO: 551 - protein, 209 aa, Glycine max
MVRGKTQMRRIENATSRQVTFSKRRNGLLKKAFELSVLCDAEVALIIFSPRGKLYEFASSSMQDTIERYRRHNRSAQTVNRSDEQNMQHLKQETANLMKKIELLEASKRKLLGEGLGSCSLEELQQIEQQLERSVSNVRARKNQVYKEQIDQLKEKERALYAENARLCEQYGIQPQPATKDPKEIQPYAESSPSSEVETELFIGLPRSI

SEQ ID NO: 552 - protein, 681 aa, Glycine max
MSGGGGSIVWFRRDLRIEDNPALTAGVRAGAVVAVFVWAPEEEGQYYPGRVSRWWLKNSLAHLHSSLRNLGTPLITKRSTDTLSSLLEVVKSTGATQLFFNHLYDPLSLVRDHRAKEVLTAQGITVRSFNADLLYEPWEVNDAHGRPFTTFAAFWERCLSMPYDPESPLLPPKRIIPGDASRCPSDTLLFEDELEKASNALLARAWSPGWSNANKALTTFINGPLIEYSKNRRKADSATTSLLSPHLHFGELSVKKVFHLVRIKQVLWANEGNKAGEESVNLFLKSIGLREYSRYISFNHPYSHERPLLGHLKFFPWVVNEGYFKAWRQGRTGYPLVDAGMRELWATGWLHDRIRVVVSSFFVKVLQLPWRWGMKYFWDTLLDADLESDALGWQYISGSLPDGREIDRIDNPQFEGYKFDPNGEYVRRWLPELARLPTEWIHHPWNAPESVLQAAGIELGSNYPLPIVGIDAAKTRLLEALSEMWQQEAASRAAMENGTEEGLGDSSESVPAAFPQDMQMEETHEPVRNNPLPVARRYQDQMVPSITSSLLRVEEEETSSDLRHSAEESSRAEVPVTANAQQNVGVTLNERMLQTTNRNAQTQYNTTMELRNVAEDSAVESSSGTRRERDGGVVPVWSPPASSYSEQFVGEENGITNSSSFLQRHPQSHQMLNWRQLPQTG

SEQ ID NO: 553 - protein, 558 aa, Glycine max
MESGEEINLNIESGGKSGGDGFIDRSKVRILLCDNDSKSSQEVFTLLLRCSYQVTSVKSARQVIDALNAEGQHIDIILAELDLPMKKGMKMLKYIARDKEFRRIPVIMMSAQDEVSIVVKCLRLGAADYLVKPLRTNELLNLWTHMWRRRRMLGLVEKNILNYDFDLVVSDPSDANTNSTTLFSDDTDDKSKRSTNPEAGISVQQEQESTIANAAAVEGPPDAHASECGPDVDGVNDHQTAHFSSGPKKSELRIGESSAFFTYVKASILKSNFEGVVNVDNNGATHVGMEVMHQACAQQGVNSLQILENGEACESQSQDDLPSSTSIPDSLSIERSCTPPASMEVSQQKHYREENSQQGVMHPRNGTHCSEHEVSGMASQHAYPYYISGVVNHVMMPSSAQMYHQKNIQDLQNHTSTAMISQYNHLPQGGPHGTGMTSFPYYPMSICLQPGQIPNPHSWQSFGNSSPSEAKLSKVDRREAALMKFRQKRKERCFDKKIRYINRKRLAERRPRVRGQFVRKLNGANVDLNGEPASIDYDEDDEEDEDDQGARDSSPEDA

SEQ ID NO: 554 - protein, 348 aa, Glycine max
MLDGEATMGTWARMCDTCRSAPSSVFCRAHTAFLCATCDARLHASLTWHERVWVCEACERAPAAFLCKADAASLCASCDADIHAANPLASRHHRVPILPIAAAPGNNDNDNVDDADLDDDDETASWLLLNPVKSASVPNNNNTNNGFSYNGEVDEYLDLVDDCDNHHFASVATTTDHYSHQHQHFGVVSHKSYAGDSVVPVQHHQHFQLGLEFDNSKAAFSYNASVNQSVSVSSMDIGVVPESPMRDVSIGHTRTPKGTIDLFSGPPIQVPSHFSPMDREARVLRYREKKKTRKFEKTIRYASRKAYAETRPRIKGRFAKRTDVEAEVDQMFSTTLITEVGYGIVPSF

SEQ ID NO: 555 - protein, 625 aa, Glycine max
  MOD_RES (604)..(604): Any amino acid
MVDYYKAVTKDKEDVRNTGKRLKCMRNEEEEVYEEEESELPLKPGFFFYPTTPTSFVVSDALEPDFPIIYVNKVFEISTGYRADEALGRNCRFLQYRDPRAQRRHPLVDPVVVSEIRRCLEEGVEFQGELLNFRKDGTPLVNRLRLAPIHDDDGTVTHVIGIQLFSEANIDLNRVSYPVFKETCNQDFDKTGKYNPKSGQSLYSQHQEMCGILQLSDEVLAHNILSRLTPRDVASIGSVCRRIRQLTKNEHVRKMVCQNAWGKEVTGTLELMTKKLGWGRLTRELTTLEAVCWRKLTVGGAVEPSRCNFSACAAGNRLVLFGGEGVDMQPMDDTFVLNLDAKNPEWRRVSVKSSPPGRWGHTLSCLNGSWLVVFGGCGRQGLLNDVFVLDLDAQQPTWREVCGGTPPLPRSWHSSCTIEGSKLVVSGGCTDAGVLLSDTYLLDLTTDNPTWREIPTSWAPPSRLGHSLSVYGRTKILMFGGLAKSGHLRLRSGEAYTIDLEDEQPQWRQLEYSAFTGLASQSAVVPPPRLDHVAVSMPCGRIIIFGGSIAGLHSPSQLFLLDPSEEKPSWRILNVPGQPPKFAWGHSTCVVGGTRVLVLGGHTXEEWILNELHELCLASRQDSDL

SEQ ID NO: 556 - protein, 222 aa, Glycine max
MGRGKIEIKRIENTTNRQVTFCKRRNGLLKKAYELSVLCDAEVALIVFSSRGRLYEYSNNNIRSTIERYKKACSDHSSASTTTEINAQYYQQESAKLRQQIQMLQNSNRHLMGDALSTLTVKELKQLENRLERGITRIRSKKHEMLLAEIEYFQKREIELENENLCLRTKITDVERIQQVNMVSGPELNAIQALASRNFFNPNMLEGGTVYPHSDKKILHLG

SEQ ID NO: 557 - protein, 190 aa, Glycine max; identical to SEQ ID NO: 502

SEQ ID NO: 558 - protein, 1175 aa, Glycine max
MSSASSLMAASSERWIDRLQYSSLFWPPPPDGQQRKDQIAAYVEYFIQFTSEQFADDIAELIRNRYPSKDILLFDDVLATFVLHHPEHGHAVVLPIISCIIDGTLVYDKASPPFASFISSVCPKIENEYSEQWALACGEILRILTHYNRPIYKTERQSGETERSTSGSHATTSEPGKSGHNSLTQQEKKPIRPLSPWITDILLSSPVGIRSDYFRWCSGVMGKYAAGELKPPSTASSRGSGKHPQLVPSTPRWAVANGAGVILSVCDDEVARNETTTLTAAAVPALLLPPPTTALDEHLVAGLPALEPYARLFHRYYAIATPSATQRLLLGLLEAPPSWAPDALDAAVQLVELLRAAEDYASGIRLPRNWMHLHFLRAIGTAMSMRAGIAADAAAALLFRILSQPALLFPPLRQVDGVEVQHEPLGGYISSYKKQIEVPAAEASIEATAQGIASMLCAHGPEVEWRICTIWEAAYGLIPTSSSAVDLPEIIVATPLQPPILSWNLYIPLLKVLEYLPRGSPSEACLMKIFAATVEAILQRTFPPESTREQNRKSKYLAGIGSASKNLAMAELRTMVHSLFLESCASVELASRLLFVVLTVCVSHEAQFSGSKRPRGEDNYSAEDIIEDLQTSENQKVSKNRKLKKQGPVAAFDSYVLAAVCALACELQLFPLISCGNNRLASNNVQDIAKPVRLNGSSHELQNGLDSAMRHTHRILAILEALFSLKPSSVGTPWSYSSNEIVAAAMVAAHVSELFRRSKTCMHALSVLIRCKWDNEIHSRASSLYNLIDIHSKAVASIVNKAEPLEATLIHVPIWKDSLVCVGVKRQNQCESSSCFAPGQTSVVPSEDSFPSKVDHNSQKTPCSKDASDYTLGKGVTGFSLDASDLANFLTMDRHIGLNCNGQIFLRSTLAEKQELCFSVVSLLWHKLIASPETQPCAESTSAQQGWRQVVDALCNVVSASPTKAATAVVLQAERELQPWIAKDDDLGQKMWRINQRIVKLIVELMRNHETSESLVIVASSSDLLLRATDGMLVDGEACTLPQLELLEATARAVQPVLEFGESGLAVADGLSNLLKCRLSATIRCLSHPSAHVRALSISVLRDILHTGSIRCSPKPRRLNGTHNPSYQYFNLDVIDWQADIEKCLTWEAHSRLSNGLSINFLDTAAKELGCTISM

SEQ ID NO: 559 - protein, 175 aa, Glycine max; identical to SEQ ID NO: 506

SEQ ID NO: 560 - protein, 865 aa, Glycine max
MDPPLQFSSPQNPNPNPNHNVFLDPTSDSIPNLLQNPIHYLSFSVPKKRRRGRSQRNPASFRLPPLTTLPTAANPSPSASDEIIFINKEPKTEALIALTAGFPADSLTEEEIDAAVLPVIGGIEQVNYTLIRNHIIAKWRENVSNWVSKKTFLDYIPPHYHSLLDSAYNYLVSHGYINFGVASSIKERVPAEASRPAVIVVGAGLAGLAAARQLLRFGFKVTVLEGRKRAGGRVYTKKMEGGNRMCAAADLGGSVLTGTLGNPLGIVARQLGELLHKVRDKCPLYCVNGMPVDPDMDVKVESAFNRLLDKASRLRQLMGEVSVDVSLGAALETFSQVYKDAVSDEEMNLFNWHLANLEYANAGLLSNLSLAFWDQDDPYDMGGDHCFLPGGNGKLVQALSENVPILYEKTVHMIRYSGDGVQVTAGSQVFEGDMALCTVPLGVLKKGFIKFIPELPQRKLDGIKRLGFGLLNKVAMLFPHVFWEMDLDTFGHLSDDPSRRGEFFLFYSYVTVAGGPLLIALVAGEAAHKFESMPPTDAVTRVLQILKGIYEPKGITVPEPIQTVCTRWGSDPFCFGSYSNVAVGASGDDYDILAESVGDGRLFFAGEATTRRYPATMHGAFLSGLREAANMAHHDNIRTLKMKVDKAPSNAHSCASLLADLFREPDIEFGSFSVIFARKNTDPKSPAILRVTFNEARKKCHEVAKQDQQHSNKLLFQQLQSHFNQQQQLHVYTLLSRQQVIDLREVRGGDEMRLNYLCEKLGVKLVGRKGLGMNADSIIDSIKAERGNRKPVSTSLALKPGVSSKLKAAGIMKRKLVRRAKVVRKSNGSINVRSAIKVSEEVKITNQVLPDVPVSGSNQNDLTNS

SEQ ID NO: 561 - protein, 714 aa, Glycine max
MKRGKDDEKVMGPMFPRLHVNDTEKGGPRAPPRNKMALYEQFSIPSQRFNSGVLPLNPNISSNTVPPASSSLRTVPERNCVYPVHLPPQRPIHRAEKCNSRQSEGTNLSASLEQRKKVDEDDFRVPVYFHSRTGQCNDKSVESFNGKKLTPTGSRYFGGSISGQSDCERDPKQFGSSVVNMRKDVRSEIDVLPQVSTSKEQASMSVRSISTRENIHTLLRQAKVTPNREFQDCHVSKFNRLQQGETCLQLECGVESRSNDIGDNGCLVESARETDKGNAPTANQTSPADAINDTEHHDTRMGSPIQRGNLNESDNASKISMVENLSTVRISPDDVVGIIGQKHFWKARRAIANQQRVFAVQVFELHRLIKVQQLIAGSPDILLEDGAFLGKSPPKGSTPKKLALEYVVKPRQQNLKRKDDSEKLNHKMECSAENAVGKTSLSSVKDGSHLSKCTPFPGNQHQTNVAADSGMGPWCFNQSPPGHPWLIPVMTPSEGLVYKPYPGPGFTGTGCGGGCGPFVPALLGGSFMNPGYGIPTSHQGVGVPPDTHPGSHGYLPPYGMPVMNSSMSESVVEQGNQFSALGSHGHNGHLPGGGKANHNTNNKSSCNLPVQRNGAISHVLKHQTSKDFELQETSASSPSEMAQGLSTGQVAEGRDVLPLFPMVPAEPESVPQSLETGQHTRVIKVVPHNRRSATASAARIFQSIQEGRKQNDSV

SEQ ID NO: 562 - protein, 421 aa, Glycine max
MLHCLNTSGNLGATCSDMTVLERQREATIKWQQHLQNNQPPYLTDFNVNVNAVFSSSSSSSQSQGLVMNICADSALGEVLTHSVKPDPGVWPEFDAGFGSSSGFLPTISPTCSRGGDLVSPKENMASAKENTKKRKPQNSKVVVAASDNKQDKRVKASGEEGESKVTEQTSNKNGKSNANKNNNRETTSAETSKDNSKGSEVQNQKPEYIHVRARRGQATDSHSLAERVRREKISERMKYLQDLVPGCNKVAGKAGMLDEIINYVQSLQRQVEFLSMKLAAVNPRLDFNLDELFTKEVFPSCAQSFPNIGMPLDMSMSNNPSYLPFNSAQQLVSCCGGLINNMGISPPNMGLRRNISTSPVPLPETFLDSSCFTQILPSSNWEGGDFQSLYNVAFDQGRTASFPSQPFTGLVEASNLKMEM

SEQ ID NO: 563 - protein, 172 aa, Glycine max; identical to SEQ ID NO: 512

SEQ ID NO: 564 - protein, 353 aa, Glycine max
MDPDAFTASLFKWDPRTVLPPAPAPPPRPSLLEYAMAPPPVTTAFHPARTAAPRELGGLEELFQAYGIRYYTAAKIAELGFTVSTLVDMKDEELDDMMNSLSQIFRWDLLVGERYGIKAAVRAERRRVEDDDIKRRNNNSNNLLSTDTTTNALDALSQEGLSEEPVVQGETEAEGSGGRKAKRTPFIVTDPGEVARGKKNGLDYLFHLYEQCREFLMQVQAIAKDRGEKCPTKVTNQVFRYAKKAGASYINKPKMRHYVHCYALHCLDEEVSNELRRAFKERGENVGAWRQACYKPLVAIAARQGWDIDAIFNAHPRLSIWYVPTKLRQLCHAERNSVSASSSVSAGSAHLPF

SEQ ID NO: 565 - protein, 1137 aa, Glycine max
MASASGAANSSVPPPQIHTSRTKLSHHSSNNNNNIDSMSKAIAQYTEDARLHAVFEQSGESGRSFNYSESIRIASESVPEQQITAYLVKIQRGGFIQPFGSMIAVDEPSFRILGYSDNARDMLGITPQSVPSLDDKNDAAFALGTDVRALFTHSSALLLEKAFSAREISLMNPIWIHSRTSGKPFYGILHRIDVGIVIDLEPARTEDPALSIAGAVQSQKLAVRAISQLQSLPGGDVKLLCDTVVESVRELTGYDRVMVYKFHEDEHGEVVSESKRPDLEPYIGLHYPATDIPQASRFLFKQNRVRMIVDCHASAVRVVQDEALVQPLCLVGSTLRAPHGCHAQYMANMGSIASLVMAVIINGNDEEGVGGRSSMRLWGLVVCHHTSARCIPFPLRYACEFLMQAFGLQLNMELQLAAQSLEKRVLRTQTLLCDMLLRDSPTGIVTQSPSIMDLVKCDGAALYFQGNYYPLGVTPTEAQIRDIIEWLLAFHGDSTGLSTDSLGDAGYPGAASLGDAVCGMAVAYITEKDFLFWFRSHTAKEIKWGGAKHHPEDKDDGQRMHPRSSFKAFLEVVKSRSLPWENAEMDAIHSLQLILRDSFKDAEHRNSKAVVDPHVSEQELQGVDELSSVAREMVRLIETATAPIFAVDVDGHVNGWNAKVSELTGLPVEEAMGKSLVHDLVFKESEETMNKLLSRALKGEEDKNVEIKMRTFGPEHQNKAVFLVVNACSSKDFTNNVVGVCFVGQDVTGQKIVMDKFINIQGDYKAIVHSPNPLIPPIFASDDNTCCLEWNTAMEKLTGWGRVDVIGKMLVGEVFGSCCQLKGSDSITKFMIVLHNALGGQDTDKFPFSFLDRHGKYVQTFLTANKRVNMEGQIIGAFCFLQIMSPELQQALKAQRQQEKNSFGRMKELAYICQGVKNPLSGIRFTNSLLEATSLTNEQKQFLETSVACEKQMLKIIRDVDLESIEDGSLELEKGEFLLGNVINAVVSQVMLLLRERNLQLIRDIPEEIKTLAVYGDQLRIQQVLSDFLLNIVRYAPSPDGWVEIHVRPRIKQISDGLTLLHAEFRMVCPGEGLPPELIQDMFNNSRWGTQEGLGLSMSRKILKLMNGEVQYIREAERCYFYVLLELPVTRRSSKKC

SEQ ID NO: 566 - protein, 1170 aa, Glycine max
MAASSERWIDRLQYSSLFWPPPPDGQQRKDQIAAYVEYFIQFTSEQFADDIAELIRNHYPSKDILLFDDVLATFVLHHPEHGHAVVLPIISCIIDGTLVYDKASPPFASFISSVCPKIENEYSEEWALACGEILRILTHYNRPIYKTERQSGETERSTSGSHATTSEPGKSGHNSLTQHEKKPIRPLSPWITDILLASPVGIRSDYFRWCSGIMGKYAAGELKPPSTASSRGSGKHPQLVPSTPRWAVANGAGVILSVCDDEVARNETATLTAAAVPALLLPPPTTALDEHLVAGLPALEPYARLFHRYYAIATPSATQRLLLGLLEAPPSWAPDALDAAVQLVELLRAAEDYASGIRLPRNWMHLHFLRAIGTAMSMRAGIAADAAAALLFRILSQPALLFPPLRQVDGVEVQHEPLGGYISSYKKQIEVPAAEASIEATAQGIASMLCAHGPEVEWRICTIWEAAYGLIPTSSSAVDLPEIIVATPLQPPVLSWNLYIPLLKVLEYLPRGSPSEACLMKIFAATVEAILQRTFPPESTREQNRKSKYLAGIGFGSASKNLAVAELRTMVHSLFLESCASVELASRLLFVVLTVCVSHEAQFSGSKRPRGEDNYSSEDIIEDLQTSENQKESKNRKLKKQGPVAAFDSYVLAAVCALACELQLFPLISRGNNHLASNKVQDIAKPVRLNGSSHELRNGLDSAVRHTHRILAILEALFSLKPSSVGTPWSYSSNEIVAAAMVAAHVSELFRRSKACMHALSVLIRCKWDNEIHSRASSLYNLIDIHSKAVASIVNKAEPLEATLIHAPIRKDSLVCVGVKRQNQCESSSCFDAGRTSVVPSEDSFPSKLDHNSNKTPCPKGASDYTLGKGVTGFSLDASDLANFLTMDRHIGLNCNGQIFLRSTLAEKQELCFSVVSLLWHKLIASPETQPCAESTSAQQGWRQVVDALCNVVSASPTKAATAVVLQAERELQPWIAKDDDSGQKMWRINQRIVKLIVELMRNHETAESLVIVASSSDLLLRATDGMLVDGEACTLPQLELLEATARAVQPVLEFGESGLAVADGLSNLLKCRLSATIRCLSHPSAHVRALSISVLRDILHTGSIRCSPKPRRLNGTHNPSYQYFNLDAVDWQADIEKCLTWEAHSRLSNGLSINFLDIAAKELGCTISM

SEQ ID NO: 567 - protein, 264 aa, Glycine max
MARGLKKHLKRLNAPKHWMLDKLGGAFAPKPSSGPHKSRECLPLILILRNRLKYALTYREVIAILMQRHVLVDGKVRTDKTYPAGFMDVVSIPKTNENFRLLYDTKGRFRLHSVRDEESKFKLCKVRSVQFGQKGIPYLNTYDGRTIRYPDPLIKANDTIKLDLESNKITDFIKFDVGNVVMVTGGRNRGRVGVIKNREKHKGSFETIHVQDATGHEFATRMGNVFIIGKGTKPWVSLPKGKGIKLSIIEEARKRLAAQNETVA

SEQ ID NO: 568 - protein, 175 aa, Glycine max; identical to SEQ ID NO: 513

SEQ ID NO: 569 - protein, 533 aa, Glycine max
MKKDIEDEVLPNDMSGAQLNDESYEGSAGIVLKKGPWTSTEDDILVDYVKKHGEGNWNAVQKHTGLFRCGKSCRLRWANHLRPNLKKGAFAAEEERLIAELHAKMGNKWARMAAHLPGRTDNEIKNYWNTRIKRRQRAGLPLYPPEVSLHALQESQHSQSTGGLNGGDKMHPDFLQKNSYEIHDAIFDSLKDNQGILPYVHELSDISVYGNKLKGLDSSQYCSFVPPTSPKRKRLKESTIPFIDSCAMKKKDLYPFDQIQDNNSDKIAQSFGMQAPLDPGLSSHSSMCYSHSLSNGNSSTSKPYEAMKLELPSLQYPELDLGSWGSSPPPSLLESVDDFLQSPTAISTLESDCSSPQNSGLLDALLYQAKTMSSSKNHCSDKSSNSSTATPGDRADSSILNVYETEWEDYADPVSPFGATSILNECPALRANANSLNGQLPVQTFTGNLPKLESVDQVWTPNNENLTLSLLNITRPDFLLASDWYDLGSGHCKNQTITTDAATAFLGDDLATDLKHMTAGISKTMFENPFQPL

SEQ ID NO: 570 - protein, 176 aa, Glycine max; identical to SEQ ID NO: 515

SEQ ID NO: 571 - protein, 193 aa, Glycine max
MSLQSQSPSKFTTLFISSNMSNPSDEREQCQKKTKSTICEASNFRTSRRRFCSNNKNEEEMNNKGVSTTLKLYDDPWKIKKTLTDSDLGILSRLLLAADLVKKQILPMLGAYHARAAETEGTPVRVWDMDTKSMHQLVLKRWSSSKSYVLIGKWNQDFVRRRDLRKGDEIGFHWDPYNCVFNFCVLKQAMPEN

SEQ ID NO: 572 - protein, 192 aa, Glycine max
MSLQSQIPSKFKIIFISSNMSNPSDEKEQCQKKRKSTICEASNFKTSRRRFFSNKNEEDMNKGVSTTLKLYDDPWKIKKTLTDSDLGILSRLSLAADLVKKQILPMLGADHARAAETEEGTPVRVWDMDTKSMHQLVLKRWSSSKSYVLIGKWNQDFVRRRDLKKGDEIGFHWDPYNCVFNFCVLKRAMPEN

SEQ ID NO: 573 - protein, 192 aa, Glycine max
MSLQSQIPSKFKIIFISSNMSNHSDEKEQCQKKRKSTICEASNFRTSRRRFCSNKNEEEMNKGVSTTLKLYDDPWKIKKTLTDSDLGILSRLSLATDLVKKQILPMLGADHARAAETEEGTPVRVWDMDTKSMHQLVLKRWSSSKSYVLIAKWNQDFVRRRDLKKGDEIGFHWDPYNCVFNFCVLKRAMPEN

SEQ ID NO: 574 - protein, 510 aa, Glycine max
MFIENFKVECPNVKYTETEIQSVYNYETTELVHENRNGTYQWIVKPKSVKYEFKTNIHVPKLGVMLVGWGGNNGSTLTGGVIANREGISWATKDKIQQANYFGSLTQASAIRVGSFQGEEIYAPFKSLLPMVNPDDIVFGGWDISNMNLADAMARAKVFDIDLQKQWRPYMESMLPLPGIYDPDFIAANQEERANNVIKGTKQEQVQQIIKDIKAFKEATKVDKVVVLWTANTERYSNLVVGLNDTMENLLAAVDRNEAEISPSTLYAIACVMENVPFINGSPQNTFVPGLIDLAIARNTLIGGDDFKSGQTKMKSVLVDFLVGAGIKPTSIVSYNHLGNNDGMNLSAPQTFRSKEISKSNVVDDMVNSNAILYEPGEHPDHVVVIKYVPYVGDSKRAMDEYTSEIFMGGKSTIVLHNTCEDSLLAAPIILDLVLLAELSTRIEFKAENEGKFHSFHPVATILSYLTKAPLVPPGTPGVNALSKQRAMLENIMRACVGLAPENNMILEYK

SEQ ID NO: 575 - protein, 516 aa, Glycine max
MSGSHQEQPLLENSFIEEDEPQETAYDSSEKIVVVGVDEFDDEENWGRVPRFSWKKLWLFTGPGFLMSIAFLDPGNLEGDLQAGAIAGYSLLWLLMWATAMGLLIQLLSARLGVATGKHLAELCREEYPPWARIVLWIMAELALIGSDIQEVIGSAIAIRILSHGVVPLWAGVVITALDCFIFLFLENYGVRTLEAFFAILIGVMAISFAWMFGEAKPSGKELLLGVLIPKLSSKTIQQAVGVVGCLIMPHNVFLHSALVQSRQVDRSKKGRVQEALNYYSIESTLALVVSFIINIFVTTVFAKGFYGSELANSIGLVNAGQYLEETYGGGLFPILYIWGIGLLAAGQSSTITGTYAGQFIMGGFLNLRLKKWMRALITRSCAIIPTMIVALLFDTSEESLDVLNEWLNVLQSVQIPFALIPLLCLVSKEQIMGTFRIGAVLKTTSWLVAALVIVINGYLLTEFFSSEVNGPMIGTVVGVITAAYVAFVVYLIWQAITYLPWQSVTQPKTIAHSEG

SEQ ID NO: 576 - protein, 866 aa, Glycine max
MFSVPGVSGILNRGGGHKIKGTVVLMRKNVLDFNSVADLTKGNVGGLIGTGLNVVGSTLDNLTAFLGRSVALQLISATKPLANGKGKVGKDTFLEGIIVSLPTLGAGESAFNIQFEWDESMGIPGAFYIKNYMQVEFYLKSLTLEDVPNQGTIRFVCNSWVYNTKLYKSVRIFFANHTYVPSETPAALVGYREEELKNLRGDGKGERKEHDRIYDYDVYNDLGNPDHGENFARPILGGSSTHPYPRRGRTGRYPTRKDQNSEKPGEVYVPRDENFGHLKSSDFLAYGIKSLSQYVLPAFESVFDLNFTPNEFDSFQDVRDLHEGGIKLPTEVISTIMPLPVVKELFRTDGEQVLKFPPPHVIQVSKSAWMTDEEFAREMVAGVNPCVIRGLQEFPPKSNLDPTIYGEQTSKITADALDLDGYTVDEALASRRLFMLDYHDVFMPYIRRINQTYAKAYATRTILFLRENGTLKPVAIELSLPHPAGDLSGAVSQVILPAKEGVESTIWLLAKAYVVVNDSCYHQLMSHWLNTQAVIEPFIIATNRHLSALHPIYKLLTPHYRDTMNINALARQSLINADGIIEKSFLPSKHSVEMSSAVYKNWVFTDQALPADLIKRGVAIKDPSAPHGLRLLIEDYPYAVDGLEIWAAIKTWVQEYVSLYYARDDDVKPDSELQQWWKEAVEKGHGDLKDKPWWPKLQTIEELVEICTIIIWTASALHAAVNFGQYPYGGFILNRPTSSRRLLPEKGTPEYEEMVKSHQKAYLRTITSKFQTLVDLSVIEILSRHASDEVYLGQRDNPHWTSDSKALQAFQKFGNKLKEIEEKLARKNNDQSLSNRLGPVQLPYTLLHPNSEEGLTCRGIPNSISI

SEQ ID NO: 577 - protein, 411 aa, Glycine max; identical to SEQ ID NO: 525

SEQ ID NO: 578 - protein, 857 aa, Glycine max
MLGGLLHRGHKIKGTVVLMRKNVLDVNSVTSVGGIIGQGLDLVGSTLDTLTAFLGRSVSLQLISATKADANGKGKLGKATFLEGIITSLPTLGAGQSAFKINFEWDDGSGIPGAFYIKNFMQTEFFLVSLTLEDIPNHGSIHFVCNSWIYNAKLFKSDRIFFANQTYLPSETPAPLVKYREEELHNLRGDGTGERKEWERIYDYDVYNDLGDPDKGENHARPVLGGNDTFPYPRRGRTGRKPTRKDPNSESRSNDVYLPRDEAFGHLKSSDFLTYGLKSVSQNVLPLLQSAFDLNFTPREFDSFDEVHGLYSGGIKLPTDIISKISPLPVLKEIFRTDGEQALKFPPPKVIQVSKSAWMTDEEFAREMLAGVNPNLIRCLKDFPPRSKLDSQVYGDHTSQITKEHLEPNLEGLTVDEAIQNKRLFLLDHHDPIMPYLRRINATSTKAYATRTILFLKNDGTLRPLAIELSLPHPQGDQSGAFSQVFLPADEGVESSIWLLAKAYVVVNDSCYHQLVSHWLNTHAVVEPFIIATNRHLSVVHPIYKLLHPHYRDTMNINGLARLSLVNDGGVIEQTFLWGRYSVEMSAVVYKDWVFTDQALPADLIKRGMAIEDPSCPHGIRLVIEDYPYTVDGLEIWDAIKTWVHEYVFLYYKSDDTLREDPELQACWKELVEVGHGDKKNEPWWPKMQTREELVEACAIIIWTASALHAAVNFGQYPYGGLILNRPTLSRRFMPEKGSAEYEELRKNPQKAYLKTITPKFQTLIDLSVIEILSRHASDEVYLGERDNPNWTSDTRALEAFKRFGNKLAQIENKLSERNNDEKLRNRCGPVQMPYTLLLPSSKEGLTFRGIPNSISI

SEQ ID NO: 579 - protein, 581 aa, Glycine max
MCGILAVLGCSDDSRAKRVRVLELSRRLKHRGPDWSGLHQHGDCFLAHQRLAIVDPASGDQPLFNEDKSVIVTVNGEIYNHEELRKQLPNHNFRTGSDCDVIAHLYEEHGEDFVDMLDGIFSFVLLDTRDNSFIVARDAIGVTSLYIGWGLDGSVWISSEMKGLNDDCEHFECFPPGHLYSSKERGFRRWYNPPWFSEAIPSAPYDPLVLRHAFEQAVIKRLMTDVPFGVLLSGGLDSSLVASITSRYLANTKAAEQWGSKLHSFCVGLEGSPDLKAAKEVADYLGTVHHEFTFTVQDGIDSIEDVIYHIETYDVTTIRASTPMFLMSRKIKSLGVKWVISGEGSDEIFGGYLYFHKAPNKEEFHRETCRKIKALHQYDCLRANKSTFAWGLEARVPFLDKAFINAAMSIDPEWKMIKRDEGRIEKWILRRAFDDEEHPYLPKHILYRQKEQFSDGVGYSWIDALKAHPPKHVTEKMMLNAGNIYPHNTPKTKEAYYYRMIFERFFPQNSARLTVPGGASAACSTAKAVEWDAAWSNNLDPSGRAALGVHISAYENQNNKGVEIEKIIPMDAAPLGVAIQG

SEQ ID NO: 580 - protein, 579 aa, Glycine max
MCGILAVLGCSDSSQAKRVRVLELSRRLKHRGPDWSGLHQYGDNYLAHQRLAIVDPASGDQPLFNEDKTVVVTVNGEIYNHEELRKQLPNHTFRTGSDCDVIAHLYEEHGENFMDMLDGIFSFVLLDTRDNSFIVARDAIGVTSLYIGWGLDGSVWISSELKGLNDDCEHFESFPPGHLYSSKERAFRRWYNPPWFSEAIPSAPYDPLALRHAFEKAVVKRLMTDVPFGVLLSGGLDSSLVAAVTARYLAGTKAAKQWGTKLHSFCVGLEGAPDLKAAKEVAEYIGTVHHEFHYTVQDGIDAIEDVIYHIETYDVTTIRASIPMFLMSRKIKSLGVKMVISGEGSDEIFGGYLYFHKAPNKEEFHQETCRKIKALHKYDCLRANKSTFAWGLEARVPFLDKEFIRVAMNIDPECKMIKKEEGRIEKWALRRAFDDEEHPYLPKHILYRQKEQFSDGVGYGWIDGLKAHAEKHVTDRMMLNAANIFPFNTPTTKEAYHYRMIFERFFPQNSARLTVPGGPSVACSTAKAVEWDAAWSNNLDPSGRAALGVHASAYGNQVKAVEPEKIIPKMEVSPLGVAI

SEQ ID NO: 581 - protein, 839 aa, Glycine max
MFSAGHKIKGTVVLMPKNELEVNPDGSAVDNLNAFLGRSVSLQLISATKADAHGKGKVGKDTFLEGINTSLPTLGAGESAFNIHFEWDGSMGIPGAFYIKNYMQVEFFLKSLTLEAISNQGTIRFVCNSWVYNTKLYKSVRIFFANHTYVPSETPAPLVSYREEELKSLRGNGTGERKEYDRIYDYDVYNDLGNPDKSEKLARPVLGGSSTFPYPRRGRTGRGPTVTDPNTEKQGEVFYVPRDENLGHLKSKDALEIGTKSLSQIVQPAFESAFDLKSTPIEFHSFQDVHDLYEGGIKLPRDVISTIIPLPVIKELYRTDGQHILKFPQPHVVQVSQSAWMTDEEFAREMIAGVNPCVIRGLEEFPPKSNLDPAIYGDQSSKITADSLDLDGYTMDEALGSRRLFMLDYHDIFMPYVRQINQLNSAKTYATRTILFLREDGTLKPVAIELSLPHSAGDLSAAVSQVVLPAKEGVESTIWLLAKAYVIVNDSCYHQLMSHWLNTHAAMEPFVIATHRHLSVLHPIYKLLTPHYRNNMNINALARQSLINANGIIETTFLPSKYSVEMSSAVYKNWVFTDQALPADLIKRGVAIKDPSTPHGVRLLIEDYPYAADGLEIWAAIKTWVQEYVPLYYARDDDVKNDSELQHWWKEAVEKGHGDLKDKPWWPKLQTLEDLVEVCLIIIWIASALHAAVNFGQYPYGGLIMNRPTASRRLLPEKGTPEYEEMINNHEKAYLRTITSKLPTLISLSVIEILSTHASDEVYLGQRDNPHWTSDSKALQAFQKFGNKLKEIEEKLVRRNNDPSLQGNRLGPVQLPYTLLYPSSEEGLTFRGIPNSISI

SEQ ID NO: 582 - protein, 413 aa, Glycine max
MGSLGAILKHPDDFYPLLKLKMAARNAEKQIPPEPHWAFCYTMLHKVSRSFALVIQQLGIELRNAVCIFYLVLRALDTVEDDTSIETDVKVPILIAFHRHIYDRDWHFSCGTKEYKVLMDQFHHVSTAFLELGKNYQEAIEDITKRMGAGMAKFICKEVETIDDYDEYCHYVAGLVGLGLSKLFHASGSEDLAPDDLSNSMGLFLQKTNIIRDYLEDINEIPKSRMFWPRQIWSEYVNKLEDLKYEENSVKAVQCLNDMVTNALMHPEDCLKYMAALRDPPIFRFCAIPQIMAIGTLALCYNNIEVFRGVVKMRRGLTAKVIDRTKTMADVYGAFFDFASMLEPKVDKNDPNATKTLSRLEAIQKTCRESGLLSKRKSYIVNDESGYGSTMIVILVIMVSIIFAYLSANHHNS

SEQ ID NO: 583 - protein, 530 aa, Glycine max
MAEIEGSPGSSMHGVTGREQTFVASVASPIVPTDTTAKFALPVDSEHKAKVFKLFSLANPHMRTFHLSWISFFTCFVSTFAAAPLVPIIRDNLNLTKSDIGNAGVASVSGSIFSRLAMGAVCDMLGPRYGCAFLIMLSAPTVFCMSFVKDAAGYIAVRFLIGFSLATFVSCQYWMSTMFNSKIIGLANGTAAGWGNMGGGATQLIMPLVYELIRRAGATPFTAWRIAFFVPGFMHVIMGILVLTLGQDLPDGNLGALRKKGDVAKDKFSKVLWYAITNYRTWIFALLYGYSMGVELTTDNVIAEYFYDRFNLKLHTAGIIAASFGMANLVARPFGGYASDVAARLFGMRGRLWTLWILQTLGGVFCIWLGRANSLPIAVLAMILFSIGAQAACGATFGIIPFISRRSLGIISGLTGAGGNFGSGLTQLVFFSTSKFSTATGLSLMGVMIVACTLPVSVVHFPQWGSMFLPPSKDVSKSTEEFYYTSEWNEEEKQKGLHQQSLKFAENSRSERGKRVASAPTPPNATPTHV

SEQ ID NO: 584 - protein, 355 aa, Glycine max
MSLLSDLINLNLSDTTEKVIAEYIWIGGSGMDLRSKARTLPGPVSDPSELPKWNYDGSSTGQAPGEDSEAIYTHKPFQDPFRRGNNILVICDAYTPAGEPIPTNKRHAAAKVFSHPDVVAEVPWYGIEQEYTLLQKDIQWPLGWPVGGFPGPQGPYYCGVGADKAFGRDIVDAHYKACIYAGINISGINGEVMPGQWEFQVGPSVGISAGDEIWAARYILERITEIAGVVVSFDPKPIPGDWNGAGAHTNYSTKSMREDGGYEVIKAAIDKLGKKHKEHIAAYGEGNERRLTGRHETADINTFLWGVANRGASVRVGRDTEKAGKGYFEDRRPASNMDPYVVTSMIADTTILWKP

SEQ ID NO: 585 - protein, 456 aa, Glycine max
MALTLKEEDAADWVYRGEGAVNLVLAYAGSSPSFIGKVVRIRKAPRNGSQSKSVSVRNSIALTPHERVLWKDVHQLISSSDKEIVGQLYVQHVMKPLLGSNSVDAGMHVLVTREFLELVEKNVSGQRPAWRVEAARVDAHCDFGLLMSDHSLFAYGSQGSSLCLSVEIKPKCGFLPLSRFISEVNAIKRRITRFEMHQTLKLLQGEISQLSEYNPLDLFSGSKERILKAIKGLLTTPQNNFRVFLNGSLILGGLGGVAKNTDVCIAKAFEDELKSIIRADDDLCTNNLSTLVTEALQKSGVLDKLLKVQKLDNIDIEGVIHAYYNITSQQCMVCKELSEEQAKIYTPLHSASLDESLRIVKDYLIATTAKDCSLMLCFRPRNEEDSGSVYDNVYLDSTEQSFDYKVYFIDLDLKRLSKVEDYYELDKKIVNCYRQIIKMDQGRNEETGLKASNAAY

SEQ ID NO: 586 - protein, 402 aa, Glycine max
MLPLLHLTHSSMALRLNPIPTQTFSLPQMPSLRSPRFRMASTLRSGSKEVENIKKPFTPPREVHVQVTHSMPPQKIEIFKSLEDWADQNILTHLKPVEKCWQPQDFLPDPSSDGFEEQVKELRERAKEIPDDYFVVLVGDMITEEALPTYQTMLNTLDGVRDETGASLTSWAIWTRAWTAEENRHGDLLNKYLYLSGRVDMKQIEKTIQYLIGSGMDPRTENSPYLGFIYTSFQERATFISHGNTARLAKEHGDIKLAQICGMIASDEKRHETAYTKIVEKLFEVDPDGTVMAFADMMRKKIAMPAHLMYDGRDDNLFDNYSAVAQRIGVYTAKDYADILEFLVGRWKVEQLTGLSGEGRKAQEYVCGLPPRIRRLEERAQARGKESSTLKFSWIHDREVLL

SEQ ID NO: 587 - protein, 211 aa, Glycine max
MLRFSSQIERLSPTLSAGSVSTIGNSTSNVAAVVSSKTRIRWTKDLHEKFVECVNRLGGAEQATPKAILKMMNTDGLTIFHVKSHLQKYRIAKFIPEPSHGKSDKRAHTKDVHHLDVKTGIQIREALKLQLDAQRCLHEQLEIQRKLQLRIEEQGRQLKKMFDQQQKTSNDVSNTQNSTIEETSISHKDGENASEGANNNSFFPSKTSPSQ

SEQ ID NO: 588 - protein, 413 aa, Glycine max
MGSLGAILKNPDDFYPLLKLKMAARNAEKQIPPEPHWAFCYTMLHKVSRSFALVIQQLGTELRNAVCIFYLVLRALDTVEDDTSIETDVKVPILIAFHRHIYDRDWHFSCGTKEYKVLMDQFHHVSTAFLELGKNYQEAIEDITKRMGAGMAKFICKEVETIDDYDEYCHYVAGLVGLGLSKLFHASGSEDLAPDDLSNSMGLFLQKTNIIRDYLEDINEIPKSRMFWPRQIWSKYVNKLEDLKYEENSVKAVQCLNDMVTNALMHAEDCLTYMAALRDPPIFRFCAIPQIMAIGTLALCYNNIEVFRGVVKMRRGLTAKVIDRTTTMADVYGAFFDFASMLESKVDKNDPNATKALSRLEAIQKTCRESGLLSKRKSYIVKDESGYGSTMIIVLVIMVSIIFSYLSASHQNN

SEQ ID NO: 589 - protein, 272 aa, Glycine max
MYHTKKFSPASMVPHKSQGGAEQLANAGVLGGSAVKTAAPSGGSGKQRLRWTSDLHDRFVDAITQLGGPDRATPKGVLRVMGVPGLTIYHVKSHLQKYRLAKYLPESPADGKDPKDEKRMSGDSISGADSSSGMPINDALRMQMEVQKRLHEQLEVQKQLQMRIEAQGKYLQKIIEEQQKLGSTLTTSETLPLSHDKQNYPQSEASGSSDALASTVSPLKKQRIDDGSKEGFTASQVRKNDNVGQLDPNLYDDAGFGFDLETKKDEDNESGQ

SEQ ID NO: 590 - protein, 521 aa, Glycine max
MGKEQVQVLNALDVAKTQWYHFTAIIIAGMGFFTDAYDLFCISLVTKLLGRIYYHVDGAAKPGSLPPNVSAAVNGVAFVGTLSGQLFFGWLGDKMGRKKVYGMTLALMVIASIASGLSFGHDAKTVMTTLCFFRFWLGFGIGGDYPLSATIMSEYSNKKTRGAFIAAVFAMQGFGILAGGVFAIIIASVFKSKFDSPPYEVDPLGSTVPQADYVWRIILMFGAIPAAMTYYSRSKMPETARYTALVAKNMEKAAADMSKVMNMEIQAEPKKEEEAQAKSYGLFSKEFMSRHGLHLLGTTSTWFLLDIAFYSQNLFQKDIFSAIGWIPPAKTMNALEEVFFIARAQTLIALCSTVPGYWFTVAFIDRIGRFAIQLMGFFFMTIFMFALAIPYDHWTLRENRIGFVVIYSLTFFFANFGPNATTFVVPAEIFPARFRSTCHGISSASGKLGAMVGAFGFLYLAQNQDPSKADAGYPAGIGVRNSLLVLGVINILGFMFTFLVPEAKGRSLEEISGEQEEETKV

SEQ ID NO: 591 - protein, 454 aa, Glycine max
MELKQQKLLLVLILTLLFATATPDSEYVRPLPRKTLTTIPWDSISKAHSSYPQQVHISLAGDKHMRVTWITDDKHSPSYVEYGTLPGRYDSIAEGECTSYNYLLYSSGKIHHAVIGPLEDNTVYFYRCGGKGAEFELKTPPAQFPITFAVAGDLGQTGWTKSTLAHIDQCKYDVYLLPGDLSYADCMQHLWDNFGKLVEPFASTRPWMVTEGNHEEENILLLTDEFVSYNSRWKMPFEESGSTSNLYYSFEVAGVHVIMLGSYADYDVYSEQYRWLKEDLSKVDRKRTPWLLVLFHVPWYNSNKAHQGAGDDMMAAMEPLLYAASVDLVIAGHVHAYERSKRLYNGRLDPCGAVHITIGDGGNREGLAHKYINPQPKWSEFREASFGHGELKIVNSTHAFWSWHRNDDDEPVKADDIWITSLVSSRCVDQKTHELRSTLTMPENSELRGLAKVM

SEQ ID NO: 592 - protein, 478 aa, Glycine max
MATWGAHSMLLSHGEGTGTPKVCVKAGLTVRGDLRFHRTRGFKYAPSVVVLKVLATARKPTRLRLLRPYCSVRGQHDHGKGYFSPTNSQIPRQHILKFAADRMLAFLKDWSNLRITAVAGILVSVLMIIPPADAVDALKTCACLLKDCRIELAKCLSNPSCAANIACLQTCNNRPDETECQIKCGDLFENSVVDEFNECAVSRKKCVPKKSDVGEFPAPNPDVLVNSFNIAEFSGKWFITSGLNPTFDTFDCQLHEFHTESNKLVGNLSWRIRTPDAGFITRSAEQRFVQDPSYPGILYNHDNKYLHYQDDWYILSSKIENKSDDYVFVYYRGRNDAWDGYGGAVVYTRSAVLPESIVPELEKASKSVGRDFSKFIRTDNTCGPEPSLVERLEKKVEEGEETIVREVEQIEEEVEKVGKTEATLFQKLAEGFKMFQEDEENFLRGLSKEEMEILDGLKMEAGEVEKLFGRALPIRKLR

SEQ ID NO: 593 - protein, 273 aa, Glycine max
MAQTMLLMSSVSSSYSVDLKKDLFLQLQSQSLRPKFSQLSFNPLPPSTSSFSSPRTFTTLALFKSKTKAAPAKTKVTKPKQKVEDGIFGTSGGFGFTKQNELFVGRVAMLGFAASLLGEGITGKGILAQLNLETGIPIYEAEPLLLFFILFTLLGAIGGLGDRGKFVDDEPTTGGVIPSGKGFREALGLGSGPLFGFTKANELFVGRLAQLGFVSSLIGEIITGKGALAQLNIETGVPINEIEPLVLFNVLFFFIAALNPGTGKFVTGDGEDD

SEQ ID NO: 594 - protein, 669 aa, Glycine max
MATTLCYNSLNPSTTVFSRTHFSVPLNTELPLDASPFVVGYNCGVGCRTRKQRKKVMHVKCAVVEAPPGVSPSAKDGNGTTPSKKQLRILVAGGGIGGLVFALAAKRKGFEVMVFEKDLSAIRGEGQYRGPIQIQSNALAALEAIDSEVADEVMRVGCITGDRINGLVDGVSGSWYVKFDRFTPAVERGLPVTRVISRMVLQEILARAVGEDIIMNASNVVNFVDDGNKVTVELENGQKYEGDVLVRADGIWSKVRKQLFGLTEAVYSGYTCYTGIADFVPADIETVGYRVFLGHKQYFVSSDVGAGKMQWYAFHKEPPGGVDEPNGKKERLLRIFEGWCDNAVDLILATEEEAILRRDIYDRIPTLTWGKGRVTLLGDSVHAMQPNMGQGGCMAIEDSYQLAWELENAWEQSIKSGSPIDIDSSLRSYERERRLRVAIIHGMARMAALMASTYKAYLGVGLGPLEFLTKFRIPHPGRVGGRFFVDIMMPSMLSWVLGGNSDKLEGRPLSCRLTDKANDQLRRWFEDDEALERAINGEWILLPHGDGTGLSKPISLSRNEMKPFIIGSAPMQDNSGSSVTISSPQVSPTHARINYKDGAFFLIDLRSEHGTWIIDNEGKQYRVPPNYPARIRPSDVIQFGSEKVSFRVKVTSSVPRVSENESTLALQGV

SEQ ID NO: 595 - protein, 273 aa, Glycine max
MAQTMLLMSSVSSSYSVDLKKDLFLQLQSQSLRPKFSQLSFNPLPSSTSSFSSPRTFTTLALFKSKTKAAPAKTKVTKPKQKVEDGIFGTSGGFGFTKQNELFVGRVAMLGFAASLLGEGITGKGILAQLNLETGIPLYEAEPLLLFFILFTLLGAIGGLGDRGKFVDDEPTTGGVIPPGKGFREALGLGSGPLFGFTKANELFVGRLAQLGFVFSLIGEIITGKGALAQLNIETGVPINEIEPLVLFNVLFFFIAALNPGTGKFVTDEGEDD

SEQ ID NO: 596 - protein, 498 aa, Glycine max
MRWRLLFLLLPLPFTFPYSISHCTCNWPLLRCKVTFGGTPNVRIKAGLTVRGDLRFHRTAGFKYGPSVVVLKVFSTAKRPTRLRLIRPYCSLRGQHNQGKGYSSLTSTQKPRQLMLKFEADRMLVFLKDWSNIRITAVAAILVSILMIIPPADAVDALKTCACLLKDCRIELAKCLSNPSCAANIACLQTCNNRPDETECQIKCGDLFENSVVDEFNECAVSRKKCVPKKSDVGEFPAPNPDVLVNSFNIADFSGKWFITSGLNPTFDTFDCQLHEFHTESNKLVGNLSWRIRTPDAGFITRSAEQRFVQDPSYPGILYNHDNEYLHYQDDWYILSSKIENKPDDYVFVYYRGRNDAWDGYGGAVIYTRSAVLPESIVPELEKAAKSVGRDFSTFIRTDNTCGPEPSLVERLEKKVEEGEETIVREVEQLEEEVEKVGKTEATLFQKLAEGFKVFQEDEENFLRGLSKEEMEILDGLKMEAGEVEKLFGRALPIRKLR

SEQ ID NO: 597 - protein, 654 aa, Glycine max
MAVFSKTHFSIPMLKELSLDTSPCVSHGSRTTKQRNTLMPIKASVAEVPPAVRKTVDENEGGGDGASQKKKLRVLVAGGGIGGLVFALAAKRKGFEVVVFEKDMSAIRGEGQYRGPIQIQSNALAALEAIDLEVAEEVLRVGCITGDRINGLVDGISGSWYIKFDTFTPAAERGLPVTRVISRMALQEILAHAVGEDVIMNDSNVVDFVDHGDKVTVELENGQKYDGDLLVGADGIWSKVRKKLFGQTEATYSGYTCYTGIADFVPADIESVGYRVFLGHKQYFVSSDVGAGKMQWYGFHQEPAGGADIPNGKKERLLKIFKGWCDNVIDLIHATEEEAILRRDIYDRTPTFTWGKGHVTLLGDSIHAMQPNMGQGGCMAIEDSYQLALELDNAWQQSIKSGSPIDIDSSLKSYERERRLRVAIVHGMARMAAMMASTYKAYLGVGLGPLEFLTKFRIPHPGRVGGRFFIDKMMPLMLNWVLGGNSSKLEGRPVCCRLSDKANDQLHRWFEDNDALERAINGEWILLPCGDEAGPTKPICLTQDEMKPCIIGSMQQKDHPGSSIIIPLPQVSQMHARINYKDGAFFLTDLRSLHGTWITDNEGRRYRVPPNYPARVRPSDVVEFGSDKASYRVKVTRSASSESEKEGTKLYQKV

SEQ ID NO: 598 - protein, 174 aa, Glycine max; identical to SEQ ID NO: 457

SEQ ID NO: 599 - protein, 495 aa, Glycine max
MALDRSIISKTTWYSVVLWMMVVLVRVHGAAARPNRKEWDSVIKLPTEPVDADSDEVGTRWAVLVAGSNGYGNYRHQADVCHAYQLLIKGGLKEENIVVFMYDDIATNELNPRHGVIINHPEGEDLYAGVPKDYTGDNVTTENLFAVILGDKSKLKGGSGKVINSKPEDRIFIYYSDHGGPGILGMPNMPYLYAMDFIDVLKKKHASGSYKEMVIYVEACESGSVFEGIMPKDLNIYVTTASNAQENSWGTYCPGMDPSPPPEYITCLGDLYSVAWMEDSEAHNLKRESVKQQYKSVKQRTSNFNNYAMGSHVMQYGDTNITAEKLYLYQGFDPATVNFPPQNGRLETKMEVVNQRDAELFLLWQMYQRSNHQSENKTDILKQIAETVKHRKHIDGSVELIGVLLYGPGKGSSVLQSVRAPGSSLVDDWTCLKSMVRVFETHCGTLTQYGMKHMRAFANICNSGVSEASMEEACLAACEGYNAGLFHPSNRGYSA

SEQ ID NO: 600 - protein, 286 aa, Glycine max
MAKDVEVQEQGGEYSAKDYHDPPPAPLFDPEELTQWSFYRALIAEFIATLLFLYVTVLTIIGYKRQTDTTVGGTDCDGVGILGIAWAFGGMIFILVYCTAGISGGHINPAVTFGLFLGRKVSLIRALLYMVAQCAGAICGTGLAKGFQKAYYNRYGGGANSVADGYNNGTALGAEIIGTFVLVYTVFSATDPKRNARDSHVPVLAPLPIGFAVFMVHLATIPITGTGINPARSFGAAVIYNEDKIWDDQWIFWVGPIVGAAVAAFYHQYILRAAAIKALGSFRSNA

SEQ ID NO: 601 - protein, 574 aa, Glycine max
MSLKALFVGCIIWLGLVELSIGGIVRHYKFDVEYMIRKPDCLEHVLMGINGQFPGPTIRAEVGDILDIALTNKLFTEGTVIHWHGIRQVGTPWADGTASISQCAINPGETFHYKFTVDRPGTYFYHGHHGMQRAAGLYGSLIVDLPKGQNEPFHYDGEFNLLFSDLWHTSSHEQEVGLSTKPLKWIGEPQTLLINGRGQFNCSLASKFINTTLPECQFKGGEECAPQILHVEPNKTYRIRIASTTSLAALNLAISNHKLVVVEADGNYVTPFAVDDVDIYSGESYSVLLRTDQDPNKNYWLSIGVRGRKPSTSQGLTILNYKTISASIFPTSPPPITPLWNDFEHSKAFTKKIIAKMGTPQPPKLYDRRVFLLNTQNRVDGFTKWSINNVSLTLPPTPYLGSIKFKINNAFDQTPPPMNFPQDYDIFNPPVNPNATIGNGVYMFNLNEVVDVILQNSNQLSVNGSEIHPWHLHGHDFWVLGYGEGKFKLGDEKKFNLTHAPLRNTAVIFPYGWTALRFKADNPGVWAFHCHIEPHLHMGMGVIFAEGVHKVGKIPREALTCGLTGKKLVENGHY

SEQ ID NO: 602 - protein, 411 aa, Glycine max; identical to SEQ ID NO: 525

SEQ ID NO: 603 - protein, 402 aa, Glycine max
MAAATASTQLIFSKPCSPSRLCPFQLCVFDTKQVLSSGRRRHVGGSGVRCMAVGEAATTGTKKRSGYELQTLTSWLLKQEQAGVIDAELTIVLSSISMACKQIASLVQRANISNLTGVQGAVNVQGEDQKKLDVVSNEVFSNCLRSSGRTGIIASEEEDVPVAVEESYSGNYIVVFDPLDGSSNIDAAASTGSNFWIYSPNDECLADIDDDPTLDTTEQRCIVNVCQPGSNLLAAGYCMYSSSIIFVLTLGNGVFVFTLDPMYGEFVLTQENLQIPRAGKIYAFNEGNYQLWDEKLKKYIDDLKDPGQSGKPYSARYIGSLVGDFHRTLLYGGIYGYPRDKKSKNGKLRLLYECAPINFIVEQAGGKGTDGLQVLRLQGTEIHQRVPLYIGEEVEKVEKYLA

SEQ ID NO: 604 - protein, 579 aa, Glycine max; identical to SEQ ID NO: 580

SEQ ID NO: 605 - protein, 315 aa, Glycine max
MAAAIEIPTIVFPNSSAQQRMPVVGMGSAPDFTCKKDTKEAIIEAVKQGYRHFDTAAAYGSEQALGEALKEAIHLGLVSRQDLFVTSKLWVTENHPHLVLPALRKSLKTLQLEYLDLYLIHWPLSSQPGKFSFPIEVEDLLPFDVKGVWESMEECQKLGLTKAIGVSNFSVKKLQNLLSVATIRPVVDQVEMNLAWQQKKLREFCKENGIIVTAFSPLRKGASRGPNEVMENDVLKEIAEAHGKSIAQVSLRWLYEQGVTFVPKSYDKERMNQNLHIFDWALTEQDHHKISQISQSRLISGPTKPQLADLWDDQI

SEQ ID NO: 606 - protein, 413 aa, Glycine max; identical to SEQ ID NO: 582

SEQ ID NO: 607 - protein, 501 aa, Glycine max
MAISDEPETVATALNHSSLRRRPTAAGLFNSSETTTDSSGDDLAKDSGSDDSISSDAAANSQPQQKQDTDFSVLKFAYRPSVPAHRKVKESPLSSDTIFRQLQSHAGLFNLCIVVLVAVNSRLIIENLMKYGWSIKYGFWFSSKSLRDWPLFMCCLSLAIFPLAAFVVERLAQQKCISEPVVVLLHLIISTVELCYPVLVILRCDSAFVSGVTLMLLTCIVWLKLVSYAHTNYDMRALTVSNEKGETLPNTLIMEYPYTVTFRSLAYFMVAPTLCYQTSYPRTPSVRKGWVFRQLVKLIIFTGVMGFIIEQYMNPIVRNSTHPLKGNLLYAIERILKLSVPNVYVWLCMFYCFFHLWLNILAELVRFGDREFYKDWWNAKTVEEYWRMWNMPVHKWMVRHIYSPCLRRGIPKGAASLIAFLVSAVFHELCIAVPCHMFKLWAFIGIMFQVPLVLITNYLQNKYRNSMVGNMIFWFIFCILGQPMSVLLYYHDLMNRKGEVD

SEQ ID NO: 608 - protein, 501 aa, Glycine max; identical to SEQ ID NO: 607

SEQ ID NO: 609 - protein, 498 aa, Glycine max
MAISDEPETVATALNHSSLRRRPTAAGLFNSPETTTDSSGDDLAKDSGSDDSISSDAANSQPQQKQDTDFSVLKFAYRPSVPAHRKVKESPLSSDTIFRQSHAGLFNLCIVVLVAVNSRLIIENLMKYGWLIKSGFWFSSKSLRDWPLFMCCLSLVVFPFAAFIVEKLAQQKCIPEPVVVVLHIIITSASLFYPVLVILRCDSAFLSGVTLMLFACVVWLKLVSYAHTNYDMRALTKSVEKGEALPDTLNMDYPYNVSFKSLAYFLVAPTLCYQPSYPRTPYIRKGWLFRQLVKLIIFTGVMGFIIEQYINPIVQNSQHPLKGNLLYAIERVLKLSVPNLYVWLCMFYCFFHLWLNILAELLRFGDREFYQDWWNAKTVEDYWRMWNMPVHKWMIRHLYFPCLRHGIPKAVALLIAFLVSALFHELCIAVPCHIFKLWAFGGIMFQVPLVFITNYLQNKFRNSMVGNMIFWFIFSILGQPMCVLLYYHDLMNRKGKLD

SEQ ID NO: 610 - protein, 498 aa, Glycine max; identical to SEQ ID NO: 609

SEQ ID NO: 611 - protein, 328 aa, Glycine max
MAPNITTVKTTITDAQAKVATDHGRAYVTFLAGNGDYVKGVVGLAKGLRKVKSMYPLVVAVLPDVPQDHRNILTSQGCIVREIEPVYPPENQTQFAMAYYVINYSKLRIWEFVEYSKMIYLDGDIQVFDNIDHLFDLPDNYFYAVMDCFCEPTWGHTKQYQIGYCQQCPHKVQWPTHFGPKPPLYFNAGMFVYEPNLATYRDLLQTVQVTQPTSFAEQDFLNIYFKDKYRPIPNVYNLVLAMLWRHPENVELDKVKVVHYCAAGSKPWRYTGKEENMEREDIKMLVKKWWDIYEDETLDYNNPLNVDKFTAALMEVGEVKFVRAPSAA

SEQ ID NO: 612 - protein, 110 aa, Glycine max
MVVLKVCLVLLFLVGGTTSANLRLSKLGLLMKSDHQHSNDDESSKPCCDQCACTKSNPPQCRCSDMRLNSCHSACKSCICALSYPAQCFCVDITDFCYEPCKPSEDDKEN

SEQ ID NO: 613 - protein, 504 aa, Glycine max
MAISDEPESVATALNHSSLRRRPSATSTAGLFNSPETTTDSSGDDLAKDSGSDDSINSDDAAVNSQQQNEKQDTDFSVLKFAYRPSVPAHRKVKESPLSSDTIFRQSHAGLFNLCIVVLVAVNSRLIIENLMKYGWLIKSGFWFSSKSLRDWPLFMCCLSLVVFPFAAFIVEKLAQRKCIPEPVVVVLHIIITSTSLFYPVLVILRCDSAFVSGVTLMLFSCVVWLKLVSYAHTNYDMRALTKLVEKGEALLDTLNMDYPYNVSFKSLAYFLVAPTLCYQPSYPRTPYIRKGWLFRQLVKLIIFTGVMGFIIEQYINPIVQNSQHPLKGNLLYATERVLKLSVPNLYVWLCMFYCFFHLWLNILAELLRFGDREFYKDWWNAKTVEDYWRMWNMPVHKWMIRHLYYPCLRHGLPKAAALLIAFLVSALFHELCIAVPCHIFKLWAFGGIMFQVPLVLITNYLQNKFRNSMVGNMIFWFIFSILGQPMCVLLYYHDLMNRKGKLD

SEQ ID NO: 614 - protein, 300 aa, Glycine max
MQQIHSMPGGRFFSGSGSADRRLRPHHQNQQALKCPRCDSLNTKFCYYNNYNLSQPRHFCKNCRRYWTKGGVLRNVPVGGGCRKSKRSSKPNKITPSETASPPPPPHPDHNNNSNSHSSSESSSLTAAVATTTEAVSAPETLNSDSNNNNNMQESKLLIPALETNNPLEQGTGDCGGIFSEIGPFTSLITTTTSTNEPLGSGFGFGNSTLPDASSFQWHYQKVSSNNEELKLPENSFLDHTVDLSGMHSKTSHGGGFGSLDWQGGADQGLFDLPNTVDHAYWSHTHWSDHDNSSSLFHLP

SEQ ID NO: 615 - protein, 74 aa, Glycine max
MADIDRSFDNNVSAVSTEKSSQVSDVEFSEAEEILIAMVYNLVGERWSLIAGRIPGRTAEEIEKYWTSRFSTSQ

SEQ ID NO: 616 - protein, 521 aa, Glycine max
MLLELALGLFVLALFLHLRPTPSAKSKALRHLPNPPSPKPRLPFIGHLHLLKDKLLHYALIDLSKKHGPLFSLSFGSMPTVVASTPELFKLFLQTHEATSFNTRFQTSAIRRLTYDNSVAMVPFGPYWKFVRKLIMNDLLNATTVNKLRPLRTQQIRKFLRVMAQSAEAQKPLDVTEELLKWTNSTISMMMLGEAEEIRDIAREVLKIFGEYSLTDFIWPLKYLKVGKYEKRIDDILNKFDPVVERVIKKRREIVRRRKNGEVVEGEASGVFLDTLLEFAEDETMEIKITKEQIKGLVVDFFSAGTDSTAVATEWALAELINNPRVLQKAREEVYSVVGKDRLVDEVDTQNLPYIRAIVKETFRMHPPLPVVKRKCTEECEINGYVIPEGALVLFNVWQVGRDPKYWDRPSEFRPERFLETGAEGEAGPLDLRGQHFQLLPFGSGRRMCPGVNLATSGMATLLASLIQCFDLQVLGPQGQILKGDDAKVSMEERAGLTVPRAHSLVCVPLARIGVASKLLS

SEQ ID NO: 617 - protein, 386 aa, Glycine max
MQIRTCHSITTQTLPQLPCSSRKAHHRHLLPPLNAAVSAAPFKARKAHSMPPEKKEIFKSLEGWASEWVLPLLKPVEQCWQPQNFLPDPSLPHEEFSHQVKELRERTKELPDEYFVVLVGDMVTEDALPTYQTMINNLDGVKDDSGTSPSPWAVWTRAWTAEENRHGDLLRTYLYLSGRVDMAKVEKTVHYLISAGMDPGTDNNPYLGFVYTSFQERATFVAHGNTARLAKEGGDPVLARLCGTIAADEKRHENAYSRIVEKLLEVDPTGAMVAIGNMMEKKITMPAHLMYDGDDPRLFEHYSAVAQRIGVYTANDYADILEFLVERWRLEKLEGLMAEGKRAQDFVCGLAPRIRRLQERADERARKMKKHHGVKFSWIFNKELLL

SEQ ID NO: 618 - protein, 380 aa, Glycine max
MVKDTKPLAYAANNGYQQKGSSFDFDPSAPPPFKIAEIRASIPKHCWVKNPWRSLSYVLRDVLVIAALVAAAIHFDNWLLWLIYCPIQGTMFWALFVLGHDCGHGSFSDSPLLNSLVGHILHSSILVPYHGWRISHRTHHQNHGHIEKDESWVPLTEKIYKNLDSMTRLIRFTVPFPLFVYPIYLFSRSPGKEGSHFNPYSNLFPPSERKGIAISTLCWATMFSLLIYLSFITSPLLVLKLYGIPYWIFVMWLDFVTYLHHHGHHQKLPWYRGKEWSYLRGGLTTVDRDYGWIYNIHHDIGTHVIHHLFPQIPHYHLVEATQAAKPVLGDYYREPERSAPLPFHLIKYLIQSMRQDHFVSDTGDVVYYQTDSLLLHSQRD

SEQ ID NO: 619 - protein, 483 aa, Glycine max
MYSATASNTFFLLSCFLLFCLLSAPSCVSMFSGIETGDLEKRDDLFPQILRDEAVARLYELGKVSDASGYLERTFLSPASMKAIDLIRKWMEDAGLRTWVDQMGNVHGRVDGANENAEALLIGSHMDTVVDAGMFDGSLGIVSAISAVKAMHVNGKLQKLKRPVEVIAFSDEEGVRFQTTFLGSGAIAGILPGTTLEISDKREVMIKDFLKENSMDITEESLLKLKYDPKSVWGYVEVHIEQGPVLEQVGFPLGVVKGIAGQTRLKVTVRGSQGHAGTVPMSMRQDPMAAAAEQIVVLESLCKHPEEYLSYDGHCSDSTVKSLSSSLVCTVGEISTWPSASNVIPGQVTYTVDIRAIDDLGREAVIYDLSKQIYQICDKRSVSCIIEHKHDAGAVICDSDLSSQLKSAAYSALKKMEGDIQDEVPTLMSGAGHDAMAISHLTKVGMLFVRCRGGISHSPQEHVLDNDVWAAGLATLSFLENLS

SEQ ID NO: 620 - protein, 314 aa, Glycine max
MVAIEIPTLVLPNSSSQQRVPVVGMGSAPDFTCKKDTKDAIIEAIKQGYRHFDTAAAYGSEQALGEALKEAVQLGLVSRQDLFVTSKLWVTDNHPHLVVSALCKSLRTLQLEYLDLYLIHWPISSQPGKFSFPIEVEDLLPFDVKGVWEAMEECQKLGLTRAIGVSNFSVKKLEKLLSVATIRPVVNQVEMNLAWQQKKLREFCSANGIVITAFSPLRKGASKGPNEVMENDVLKEIADAHGKSIAQICLRWLYEEGVTFVPKSYDKGRMNQNLQIFNWTLTEKDHEKLSEIYQNRLINGPTKPQLNDLWDDEI

SEQ ID NO: 621 - protein, 348 aa, Glycine max; identical to SEQ ID NO: 554

SEQ ID NO: 622 - protein, 506 aa, Glycine max
MDLLLLEKTLIGLFLAAVVAIAVSTLRGRKFKLPPGPLPVPIFGNWLQVGDDLNHRNLTDLAKKFGDIFLLRMGQRNLVVVSSPELAKEVLHTQGVEFGSRTRNVVFDIFTGKGQDMVFTVYGEHWRKMRRIMTVPFFTNKVVQQYRHGWESEAAAVVEDVKKNPDAAVSGTVIRRRLQLMMYNNMYRIMFDRRFESEEDPIFQRLRALNGERSRLAQSFEYNYGDFIPILRPFLKGYLKICKEVKETRLKLFKDYFVDERKKLGSTKSTNNNNELKCAIDHILDAQRKGEINEDNVLYIVENINVAAIETTLWSIEWGIAELVNHPEIQQKLRDEIDRVLGAGHQVTEPDIQKLPYLQAVVKETLRLRMAIPLLVPHMNLHDAKLGGYDIPAESKILVNAWWLANNPAHWKKPEEFRPERFFEEESLVEANGNDFRYLPFGVGRRSCPGIILALPILGITLGRLVQNFELLPPPGQSQIDTSEKGGQFSLHILKHSTIVAKPRSF

SEQ ID NO: 623 - protein, 1187 aa, Glycine max; identical to SEQ ID NO: 503

SEQ ID NO: 624 - protein, 623 aa, Glycine max
MEGFFGNCFNMILLMLCFTNLSIAFAQSHMNGFGEQPLAKIAIHKTVLALHSSASIIAVPFVLGTKGEDTQLVTVELESPIPSVDDWVGVFSPANFNSATCPDTDGIGWVEEPYICTAPIKYKYANYSNRNYAKTGKAILKFQLINQRADFSFALFSGGLSDPRLVAISNSISFANPKAPVYPRLALGKSWGEMTVTWTSGYDINEAVPFVEWGPKGGKKTRSHAGTLTFNRNSMCGEPARTVGWRDPGFIHTSFLKELWPNFRYTYKLGHMLSNGSYVWSKKYSFKASPYPGQNSLQRVIIFGDMGKAERDGSNEYADYQPGSLNTTDQLVKDLENYDIVFHIGDMPYANGYISQWDQFTAQVQEISSTVPYMIASGNHERDWPNTGSFYDTPDSGGECGVPAETMYYFPAENRAKFWYKADYGLFRFCIADSEHDWREGSEQYKFIEHCLATVDRKHQPWLIFSAHRPLGYSSNLWYGMEGSFEEPMGRESLQKLWQKYKVDIGFYGHVHNYERVCPIYQNQCVNEEKHHYSGTVNGTIHVVVGGGGSHLSDFTPSPPIWSLYRDVDYGFGKLTAFNHSYLLFEYKKSSDGEVYDSFTISRDYRDVLACVHDGCEKTTLAT

SEQ ID NO: 625 - protein, 413 aa, Glycine max; identical to SEQ ID NO: 588

SEQ ID NO: 626 - protein, 392 aa, Glycine max
MASLPSFTPFVFLLLVIGCNARPLYPLPSKGDDGNRKPLQTFRPYNIAHRGSNGELPEETHPAYLRAIEEGADFIETDILSSKDGVLVCFHDVTLDNTTDIANRTEFANRKRTYEVQGENMTGFFTVDFTLKELKSLRVKQRCSFRDQQFNGKFQIITFEEFITIALDAPRVVGIYPEIKNPVFINQHVKWSHGKRFEDKFVETLQKYGYKGSYLSKDWLRQPVFIQSFAPTSLVYISNKTDLPKVFLIDDVTVPTQDTNQSYWEITSDEYLEYIKQYVVGIGPWKDTVVPVVKNYMTNPTNLVARAHAHNLQVHPYTYRNEFPFLHFNFSQDPYMEYDFWINKIGVDGLFTDFTGSLHRYQEWTSNRKDDDDDKTESNLLHKIALLVSSYE

SEQ ID NO: 627 - protein, 424 aa, Glycine max
MPLHSDVFVAPSGYNAPQQVHITQGDQVGRAMIVSWVTVDEPGKSLVHYWSDASQHKRVAKGNHVTYRYFNYSSGFIHHCTLRDLEFNTKYYYEVGIGHTTRQFWFVTPPEVHPDAPYTFGLIGDLGQTFDSNKTLVHYESNPHKGQAVLYVGDLSYADNHPNHDNVRWDTWGRFVERSTAYQPWIWTTGNHELDYAPEIDETEPFKPFRHRYYVPYKASGSTEPFWYSVKIASAHIIVLASYSAYGKYTPQYEWLEAELPKVDRTKTPWLIVLVHSPWYNSYNYHYMEGETMKVMFEPWFVKYKVDVVFAGHVHAYERSERISNTGYNITNGRCRPLKDQSAPVYINIGDGGNIEGLASNMTNPQPEYSAYREASFGHAILEIKNRTHAHYSWHRNEDEYAVTADSMWFFNRYWHPVDDSTTK

SEQ ID NO: 628 - protein, 403 aa, Glycine max
MASSSLSLSLSLTLCLVSTLCYAHTSSLTLPVTKDHSTHQYLTILSYGTPVESAKFVLDLGGSLLWADCASRTTPSSTLAPIFHRSIRCLTAKGPEIETHRWLSSLANPIDQDQPCQITAENSITGKRVTEGELVEDLVIHRSHELLFTCSPTFLLNGLATDAKGIIGLDKSRISFSSQVFHSLKIQRKITLCLSHTSGVIQFGKMTHKSQTESEIFRYLTFTPLVANQDPTQTQSSINVNSVKINGKKVAFDTPLGGGAQLSTVVPYTTLQTSIYDNFESAYLKAASSMDMKRVDPVSPFGLCFESNGVGSSQVGPNVPIIDLVLQSEMVKWSIYGRNSMVQVSDDVMCLGFVDGGENPRNSIVIGGFQLEDVLVQIDFDTSMVGFSPSLLTKQASCSDFQP

SEQ ID NO: 629 - protein, 170 aa, Glycine max; identical to SEQ ID NO: 511

SEQ ID NO: 630 - protein, 435 aa, Glycine max
MDNSNLQRLFTLFLFSLIAPSLAQQSFRPRALVVPVKKDASTLQYITQIKQRTPLVPENLVLDIGGQFLWVDCDNNYVSSTYRPARCGSAQCSLARSDSCGNCFSAPKPGCNNNTCGVTPDNTVTGTATSGELAQDVVSLQSTNGFNPIQNATVSRFLFSCAPTFLLQGLATGVSGMAGLGRTRIALPSQLASAFSFRRKFAVCLSSSNGVAFFGDGPYVLLPNVDASQLLTFTPLLINPVSTASAFSQGEPSAEYFIGVKSIKIDEKTVPLNTTLLSINSKGVGGTKISSVNPYTVLEDSIFKAVTEAFVKASSARNITRVASVAPFEVCFSRENVLATRLGAAVPTIELVLQNQKTVWRIFGANSMVSVSDDKVLCLGFVNGGENPRTSIVIGGYQLEDNLLQFDLATSRLGFSSLLYGSRTTCANFNFTSAA

SEQ ID NO: 631 - protein, 662 aa, Glycine max
MIPDLPLPFLFSLFIIFFHLAESKPSLTATPTTLPASGATVNLRWSGIPSPSDLDFLAIYSPPTSPHDNFIGYLFLSQSATWRTGSGNLSLPLVDLRSNYSFRIFSWTRAEINPKRQDHDHNPLPVTRHLLAFSEEVSFAPHRGPQQIHLAFVGAHGKEEDMRVMYITRDPRETYVRYGEREDKLDGIAVARVERYEREHMCDAPANTSVGWRDPGFIHDAVLIGLKKGQRYYYKVGNDNGGWSATQSFVSRNSDSDETIAFLFGDMGTAVPYNTFLRTQDESISTMKWILRDVEALGDTPAFVSHIGDISYARGYSWLWDHFFAQIEPVASQVAYHVCIGNHEYDWPLQPWKPDWASYGKDGGGECGVPYSLRFNMPGNSSELTGNAAAPPTRNLYYSFDMGAVHFVYISTETNFVPGSKQYDFLKHDLESVNRSKTPFVVVQGHRPMYTTSHENRDAALRGKMLEHLEPLLVNNNVTLALWGHVHRYERFCPLNNFTCGVNAGHNAGDKKGYTVHIVIGMAGQDWQPVWEPRPDHPDDPIFPQPKWSLYRGGEFGYTRLVATKQKLVLSYVGNHDGEVHDQLEILASGEVVSGDGGCSIADANSKAGNVIVESTLSWYVKGGSVLLLGAFMGYVFGYVTSARKKSEVPESNWTPVKTEET

SEQ ID NO: 632 - protein, 315 aa, Glycine max
MAAAIEIPKIVFPNSSAQQRVPVIGMGSAPDFTCKKDTKEAIIEAVKQGYRHFDTAAAYGSEQALGEALKEAIHLGLVTRQDLFVTSKLWVTENHPHLVVPALRKSLKTLQLEYLDLYLIHWPLSSQPGKFSFPIEVDDLLPFDVKGVWESMEECQKLGLTKAIGVSNFSVKKLQNLLSVATIRPVVDQVEMNLAWQQKKLREFCKENGIILTAFSPLRKGASKGPNEVMENDVLKEIAEAHGKSIAQVSLRWLYEQGVTFVPKSYDKERMNQNLQIFDWALTEEDHHKIDEIYQSRLISGPTKPQVTDLWDDEI

SEQ ID NO: 633 - protein, 613 aa, Glycine max
MGESKFVSLAFLLVCLVVQRVWSHGYHPLSKVAVHKATVSLLDLAYIKASPAVLGLQEQTAEWVTLEYSSPIPSIGDWIGVFSPANFSASTCPKENRRVYPPLLCSAPIKYQYANYSSPLYKETGKGFLKLLLINQRSDFSFALFSGGLSNPKLVAVSDKIAFANPNAPLYPRLALGKSWNEMTVTWTSGYGINDAEPFVQWGPKEGDRMHSPAETLTFTRDSMCGAPARTVGWRDPGYIHTSHLKELWPNKIYEYRIGHKLNNVTYIWSGNYQFTAPPCPGQKSLQRVVIFGDMGKGEVDGSNEYNNFQHGSINTTQQLIQDLEDIDIVFHIGDICYANGYLPQWDQFTAQVEPIASAVPYMIASGNHERDWPGTGSFYENMDSGGECGVLAQTMFYTPASNRAKLWYSIDYGMFRFCIADTEHDWREGTEQYKFIEHCLASVDRQKQPWIIFLAHRVLGYSSCICYAEEGSFAEPMGRESFQKLWQKYKVDIAIYGHVHNYERTCPIYQNICTNEEKHHYKGRTLNGTIHVVAGGGGASLSAFTSLKTKWSIFKDYDYGFVKLTAFDHSNLLFEYKKSRDGKVYDSFKISRDYRDILACTMDSCPSITMAS

SEQ ID NO: 634 - protein, 387 aa, Glycine max
MGLAKETIMGGGGRVAKVEIQQKKPLSRVPNTKPPFTVGQLKKAIPPHCFQRSLLTSLSYVVYDLSLAFIFYIATTYFHLLPHPFSLIAWPIYWVLQGCILTGVWVIAHECGHHAFSKYPWVDDVMGLTVHSALLVPYFSWKISHRRHHSNTGSLDRDEVFVPKPKSKVAWYTKYLNNPLGRAASLLITLTIGWPLYLAFNVSGRPYDGFASHYHPYAPIYSNRERLLIYVSDVALFSVTYLLYRVATMKGLVWLLCVYGVPLLIVNGFLVTITYLQHTHYALPHYDSSEWDWLRGALATMDRDYGILNKVFHHITDTHVAHHLFSTMPHYHATEATNAMKPILGEYYRFDDTPFYKALWREARECLYVEPDEGTSEKGVYWYRNKY

SEQ ID NO: 635 - protein, 403 aa, Glycine max
MASSSLFLSLSLTLCLVSSLCYAHKSSLTLPVTKDDSTHQYLTTLSYGTPVESAKFVLDLGGSILWADCASRTTPSSTLAPIFHRSIRCLTAKGPEIETHRWLSSLANPIDQDQPCQIPAENSISGKRVTEGELVEDLVINRSHELLFTCSPTLLLNGLATGAKGMVGLDRSRTSFSSQVFHSLGTQRKITLCLSSSSGIVQFGNVAHESQPGSEIFRSLTFTPLVANQDQTQTHPSINVNSVKINGKKVSFDTPLGGGAQLSTVVPYTTLQTSIYANFESAYLKAASSMSMKRVDPVSPFGLCFESNGVGSSQVGPNVPVIDLVLQSEMVKWSIHGRNSMVQVNDDVMCLGFVDGGENPRNPIVIGGYQLEDVLVQIDFDTSMVGFSPSLLTKHATCSHFKP

SEQ ID NO: 636 - protein, 438 aa, Glycine max
MAASVKLLFLSFLSLFISFSIAQTSFRPKALVLPVTKDVSASVPQYVTQIKQRTPLVAVKLTVDLGGGYLWVNCEKGYVSSTSRPARCGSAQCSLFGLYGCSTEDKICGRSPSNTVTGVSTYGDIHADVVAVNSTDGNNPTKVVSVPKFLFICGSNVVQKGLASGVTGMAGLGRTKVSLPSQFASAFSFHRKFAICLSSSTMTNGVMFFGDGPYNFGYLNSDLSKVLTFTPLISNPVSTAPSYFQGEPSVEYFIGVKSIKVSDKNVALNTTLLSIDRNGIGGTKISTVNPYTVMETTIYKAVSEVFVKEVGAPTVAPVAPFGTCFATKDIGSTRMGPAVPGIDLVLQNDVVWTIIGANSMVYVNDVICLGFVDAGSSPSVAQVGFVAGGSHPRTSITIGAHQLENNLLQFDLATSRLGFRSIFFDHSNCANFNFTSSA

SEQ ID NO: 637 - protein, 346 aa, Glycine max; identical to SEQ ID NO: 514

SEQ ID NO: 638 - protein, 601 aa, Glycine max
MNLVLVVAWLVQLNIVYGFAHIHGFGEQPLSRIAIHKAVVSLHSSASITATPSLLGTKGEDTQWVTVDIDYPDPSADDWVGVFSPAKFNASTCPPVNDPKEVIPYICSAPIKTGKASLKFQLINQRADFSFALFSGGLLNPKLVAVSNFISFVNPKVPLYPRLAQGKSWDEMTVTWTSGYDINEATPFVEWGPKGKTQVQSPAGTLTFGRNSMCGSPARTVGWRDPGFIHTSFLKNLWPNLVYTYQLGHLLSNGSYIWSKKYSFKSSPYPGQDSLQRVIIFGDMGKAERDGSNEYNAYQPGSLNTTDQLIKDLENIDIVFHIGDITYANGYLSQWDQFTAQVEPIASTVPYMIASGNHERDWPNTGSFYSTTDSGGECGVLAQNMFFVPAENRANFWYAMDYGMFRFCIADTEHDWREGSEQYKFIEHCLATVDRQKQPWLIFAAHRVLGYSSDFWYGVEGSFEEPMGRESLQRLWQKYKVDIAFYGHVHNYERTCPIYQNQCVNDERSHYSGVVNGTIHVVAGGAGSHLSNFSQVTPKWSLYRDYDFGFVKLTAFSHSSLLFEYKKSSDGKVYDSFTISRDYKDVLACVHDSCEATTSAT

SEQ ID NO: 639 - protein, 176 aa, Glycine max; identical to SEQ ID NO: 515

SEQ ID NO: 640 - protein, 193 aa, Glycine max; identical to SEQ ID NO: 571

SEQ ID NO: 641 - protein, 219 aa, Glycine max
MTDEVVLLDFWPSPFGMRVRIALAEKGIEYEYKEEDLRNKSPLLLQMNPVHKKIPVLIHNGKPISESLIAVQYIEEVWNDRNPLLPSDPYQRAQARFWADYVDIKIHDLGKKIWTSKGEEKEAAKKEFIEALKLLEEQLGDKTYFGGDNIGFVDIALVPFYTWFKVYETFGSLNIENECPRFVAWAKRCLQKESVAKSLPDQHKVYEFVVEIRKKLVIE

SEQ ID NO: 642 - protein, 368 aa, Glycine max; identical to SEQ ID NO: 458

SEQ ID NO: 643 - protein, 667 aa, Glycine max; identical to SEQ ID NO: 526

SEQ ID NO: 644 - protein, 495 aa, Glycine max; identical to SEQ ID NO: 599

SEQ ID NO: 645 - protein, 299 aa, Glycine max
MASELELPPGFRFHPTDEELVLHYLCRKCASQPIAVPIIAEIDLYKYDPWDLPGLATYGEKEWYFFSPRDRKYPNGSRPNRAAGTGYWKATGADKPIGQPKPVGIKKALVFYAGKAPKGDKSNWIMHEYRLADVDRSVRKKNTLRLDDWVLCRIYNKKGTIEKLQPSSDVAHSRNIESSEIEDRKPEILKSGGGCLPPPAPVPAPPQATAKTDYMYFDPSDSIPKLHTDSSCSEQVVSPGFASEVQSEPKWNEWEKSLEFPFNYVDATLNNSFMAQFQGNNQMLSPLQDMFMYWPNKSF

SEQ ID NO: 646 - protein, 261 aa, Glycine max
MCTLTTVPVLPSKLNKPSLSPHHNSLFPYCGRRVGKKNKAMVPVARLFGPAIFEASKLKVLFLGVDENKHPGNLPRTYTLTHSDITAKLTLAISQTINNSQLQGWYNRFQRDEVVAQWKKVKGRMSLHVHCHISGGHFLLDILARLRYFIFCKELPVVLKAVVHGDENLFNSYPELQDALVWVYFHSNIPEFNKVECWGPLKEASAPTGGVQEEGLAIPQPCQEECQCCFPPLTLSPIQWSKQVPSRHYEPCDGIGTQQNL

SEQ ID NO: 647 - skipped

SEQ ID NO: 648 - protein, 352 aa, Glycine max
MGEVDPAFIQEPQHRPNLSTIQAEGIPIIDLSPITNHTVSDPSAIESLVKEIGRACQEWGFFQVTNHGVPLTLRQNIEKASKLFFAQTLEEKRKVSRNESSPMGYYDTEHTKNVRDWKEVFDFLAKDLTFIPLTSDEHDDRVNQWTNQSPQYPPLFRVVTQEYIQEMEKLSFKLLELIALSLGLEAKRFEEFFIKDQTSFIRLNHYPPCPYPDLALGVGRHKDPGALTILAQDEVGGLEVRRKRDQEWIRVKPTPNAYIINIGDTVQVWSNDAYESVDHRVVVNSEKERLSIPFFFFPAHDTKVKPLEELINEQNPSKYRPYNWGKFLVHRGNSNFKKQNEENIQIHHYKIA

SEQ ID NO: 649 - protein, 634 aa, Glycine max
MGSNRTIVWFRRDLRIEDNPALTAAAKEGSVLPVYVWCPKEEGQFYPGRVSRWWLKQSLAHLDQSLKSLGSRLVLIKTHSTAVALVECVKAIQATKVVFNHLYDPVSLVRDHNIKEKLVEQGISVQSYNGDLLYEPWEVNSESGRAFTTFNAFWKKCLHMQMDIVSVVPPWQLIPAEGKIEECSLEELGLENESEKPSNALLGRAWSPGWRNADKALREFVELHLLHYSKKRLKVGGESTSLLSPYLHFGELSARKVFQVTCMKQILWTNEGNSAGEESANLFLRAIGLREYSRYLCFNFPFTHERALLGHLKFFPWNPDPDIFKTWRQGRTGFPLVDAGMRELWATGWIHNRIRVIVSSFAVKMLLLPWKWGMKYFWDTLLDADLESDILGWQYISGGLPDGHELERLDNPEIQGAKFDPEGEYVRQWLPELARMPTEWIHHPWDAPLTVLRAAGVELGQNYPKPIIDIDLARERLTEAIFKMWESEAAAKAAGSEPRDEVVVDNSHTVENLDTQKVVVLGKAPCATISANDQKVPALQDSKNEPPTRKRPKHMIEEGQNQDHSQNHNKDTGLSSIDQDICSTADSSSCKKQCASTSSYSFSVPQQCSSSSNLKWPWQEKIDMEQSSSKDGAM

SEQ ID NO: 650 - protein, 338 aa, Glycine max
MASLLPQPQETKPTATTATETTPSETSITASANKSSSSNNNNSSSNSRKCEGKGGPDNNKFRYRGVRQRSWGKWVAEIREPRKRTRKWLGTFATAEDAARAYDRAAIILYGSRAQLNLQPSGSSSQSSSSRSSSSSTQTLRPLLPRPSGFTFNFPFNSAPATTVPYPYNNSHNYTYTPPVLYPIDNSKNHNINTVQVHHPHHYRCPEEVVQVPHSESDLGGLGGNNNIVVDGSIRSTSYQRHGFLDNINNNNNHVHVQVQHGVFSNQQQQHQNSVVEGVNSSVVGSVSSSMDASSVDPDLALVGTMGLGSSSPFWSMANEDDYTGSLWDYNDPFFFDL

SEQ ID NO: 651 - protein, 421 aa, Glycine max; identical to SEQ ID NO: 562

SEQ ID NO: 652 - protein, 634 aa, Glycine max
MGSNRTIVWFRRDLRIEDNPALAAAAKEGSVLPVYIWCPKEEGQFYPGRVSRWWLKQSLAHLDQSLKSLGSRLVLIKTHSTVTALVECVKAIQATKVVFNHLYDPVSLVRDHNIKEKLVEQGISVQSYNGDLLYEPWEVYSESGRAFTTFNAFWKKCLHMQMDIVSVVPPWQLIPAEGKVEECPLEELGLENESEKPSNALLGRAWSPGWRNADKALTEFVEQHLLDYSKKRLKVGGDSTSLLSPYLHFGELSVRKVFQVTRMKQILWTNEGNSAGEESVNLFLRAIGLREYSRYLCFNFPFTHEKALLGHLKFFPWNPDADIFKNWRQGRTGFPLVDAGMRELWATGWIHNRIRVIVSSFAVKMLLLPWKWGMKYFWDTLLDADLESDILGWQYISGGLPDGHEPERLDNPEIQGVKFDPEGEYVRQWLPELARMPTEWIHHPWDAPLTVLRAAGVELGQNYPKPIIDIDLARERLIEAIFKMWESEAAAKAAGSEPRDEVVVDNSNSLENLDTRKVVVLGKAPCSTISANDQKVPALQDSKNEPPTRKRPKHMVEEGQNQDNSQNHNKDTGMSSIDQDICSTADSSSCKKQCASTSSYSFSVPQQCSSSSNLKWPWQDQTDMEQSSSKDGAM

SEQ ID NO: 653 - protein, 353 aa, Glycine max
MEKVDQAFIQYPQHRPNLTIIQPEHIPIIDLSPITNHTVSHPSPIEGLVKEIGNACKEWGFFQVINHGVSLTLRQNIEKASKLFFAQSLEEKRKVSRDESSPMGYYDTEHTKNIRDWKEVFDFLAKDPTFVPLTSDEHDNRLTQWTNPSPQYPPHFRDIIKEYVEEMEKLSFKLMELIALSLGLEAKRFEEFFIKDQTSFLRLNYYPPCPYPHLALGVGRHKDSGPLTILAQDEVGGLEVRPKADQDWIRVKPIPNAYIINLGDMIQVWSNDAYESVEHRVVVNSEKARFSIPFFLFPAHDTVVKPLEELINEQNPSKFRPYKWGKFLVHRLDSNFKKQNAENVQTYHYKIRE

SEQ ID NO: 654 - protein, 600 aa, Glycine max
MGMNKTIVWFRRDLRIEDNPALAAAAAAKDGSVFPVYIWCPKEEGQFYPGRVSRWWLKQSLAHLDKSLKSLGAELMLIKTDSTLEALLECVNAIQATKVVFNHLYDPVSLVRDHNIKEKLVELGISVKSYNGDLLFEPWSIYDETGHAFTTFDPFWNRCLHMQMKAFSLIPPQLILAEGKVGKCSIEQLGLEDESEKSSNALLGRAWYPGWNKTDKALTEFVEQHLLHYSKNRLKVGGDSTSLLSPYIHFGELSVRKVFQLARTKQILWANEGNSAGEESATVFLRAIGLREYSRYLCFNFPSTIEKPLLGNLAFFPWKTDPANFKAWRQGRTGYPLVDAGMRELWATGWIHNKIRVIVSSFAVKMLLIPWRWGMKYFWDTLLDADLESDILGWQYISGCLPDGHKLERLDDPAIHGAKFDPEGEYVRQWLPELARMPAEWIHHPWNAPLTVLRASGVELGQNYPKPIIDIDQAREQLTEAIFKMWENEAASKGSGSEERHEVVDESESLAIPKVFLKDKVSHITSSSNDQKVPTLDNPQIDPPNRKRPKCSAEVEQKQNNSRNLSKDTGVSSIDQDVSSTAESSCKRESSSSYSFSVPQ

SEQ ID NO: 655 - skipped

SEQ ID NO: 656 - protein, 476 aa, Glycine max
MLDLNLTAESTQNDELLVLLDKFPEASSGTSNSSIVNAEGSSNEDSCSTRAGDVFTFNFGILKVEAANDVVAAATKELFPVSSENWQGQSSTSLFQARKSLMDLSLDQQHGEVKVVQVQPQPKVKKSRRGPRSRSSQYRGVTFYRRTGRWESHIWDCGKQVYLGGFDTAHAAARAYDRAAIKFRGLDADINFNLVDYEEDLKQMKNLSKEEFVHILRRHSSGFSRGSSKYRGVTLHKCGRWEARMGQFLGKKYIYLGLFDSEVEAARAYDKAAIKCNGREAVTNFEPSTYESEMKPEAINEGGSHDLDLSLGIATPGHGPKENRGHLQFQSIPYNMHPGRSSMMETNINSVIGDPSLKRLVVTEERPSVWNAAYSTFFPNLERAERMGTDPSKGVPNPNWAWQTHGQVTDTPVPPFSTAASSGFSISATFPSTAIFPTKSINSVPHSLCFTSPSTPGSNAPQFYNYYEVKSPQPPS

SEQ ID NO: 657-676 - skipped (20 entries)

SEQ ID NO: 677 - DNA, 3079 bp, Artificial Sequence
  Description of Artificial Sequence: Synthetic polynucleotide
tcgcgcgtttcggtgatgacggtgaaaacctctgacacatgcagctcccggagacggtcacagcttgtctgtaagcggatgccgggagcagacaagcccgtcagggcgcgtcagcgggtgttggcgggtgtcggggctggcttaactatgcggcatcagagcagattgtactgagagtgcaccatatgcggtgtgaaataccgcacagatgcgtaaggagaaaataccgcatcaggcgccattcgccattcaggctgcgcaactgttgggaagggcgatcggtgcgggcctcttcgctattacgccagctggcgaaagggggatgtgctgcaaggcgattaagttgggtaacgccagggttttcccagtcacgacgttgtaaaacgacggccagtggaattctaaagatctaaaataaatggtaaaatgtcaaatcaaaactaggctgcagtatgcagagcagagtcatgatgatactacttactacaccgattcttgtgtgcagaaaaatatgttaaaataattgaatctttctctagccaaatttgacaacaatgtacaccgttcatattgagagacgatgcttcttgtttgctttcggtggaagctgcatatactcaacattactccttcagcgagttttccaactgagtcccacattgcccagacctaacacggtattcttgtttataatgaaatgtgccaccacatggattgaagcaagagacgttctagggttttagagctagaaatagcaagttaaaataaggctagtccgttatcaacttgaaaaagtggcaccgagtcggtgctttttttggatccggcgcgccgcatgcaagcttggcgtaatcatggtcatagctgtttcctgtgtgaaattgttatccgctcacaattccacacaacatacgagccggaagcataaagtgtaaagcctggggtgcctaatgagtgagctaactcacattaattgcgttgcgctcactgcccgctttccagtcgggaaacctgtcgtgccagctgcattaatgaatcggccaacgcgcggggagaggcggtttgcgtattgggcgctcttccgcttcctcgctcactgactcgctgcgctcggtcgttcggctgcggcgagcggtatcagctcactcaaaggcggtaatacggttatccacagaatcaggggataacgcaggaaagaacatgtgagcaaaaggccagcaaaaggccaggaaccgtaaaaaggccgcgttgctggcgtttttccataggctccgcccccctgacgagcatcacaaaaatcgacgctcaagtcagaggtggcgaaacccgacaggactataaagataccaggcgtttccccctggaagctccctcgtgcgctctcctgttccgaccctgccgcttaccggatacctgtccgcctttctcccttcgggaagcgtggcgctttctcatagctcacgctgtaggtatctcagttcggtgtaggtcgttcgctccaagctgggctgtgtgcacgaaccccccgttcagcccgaccgctgcgccttatccggtaactatcgtcttgagtccaacccggtaagacacgacttatcgccactggcagcagccactggtaacaggattagcagagcgaggtatgtaggcggtgctacagagttcttgaagtggtggcctaactacggctacactagaagaacagtatttggtatctgcgctctgctgaagccagttaccttcggaaaaagagttggtagctcttgatccggcaaacaaaccaccgctggtagcggtggtttttttgtttgcaagcagcagattacgcgcagaaaaaaaggatctcaagaagatcctttgatcttttctacggggtctgacgctcagtggaacgaaaactcacgttaagggattttggtcatgagattatcaaaaaggatcttcacctagatccttttaaattaaaaatgaagttttaaatcaatctaaagtatatatgagtaaacttggtctgacagttaccaatgcttaatcagtgaggcacctatctcagcgatctgtctatttcgttcatccatagttgcctgactccccgtcgtgtagataactacgatacgggagggcttaccatctggccccagtgctgcaatgataccgcgagacccacgctcaccggctccagatttatcagcaataaaccagccagccggaagggccgagcgcagaagtggtcctgcaactttatccgcctccatccagtctattaattgttgccgggaagctagagtaagtagttcgccagttaatagtttgcgcaacgttgttgccattgctacaggcatcgtggtgtcacgctcgtcgtttggtatggcttcattcagctccggttcccaacgatcaaggcgagttacatgatcccccatgttgtgcaaaaaagcggttagctccttcggtcctccgatcgttgtcagaagtaagttggccgcagtgttatcactcatggttatggcagcactgcataattctcttactgtcatgccatccgtaagatgcttttctgtgactggtgagtactcaaccaagtcattctgagaatagtgtatgcggcgaccgagttgctcttgcccggcgtcaatacgggataataccgcgccacatagcagaactttaaaagtgctcatcattggaaaacgttcttcggggcgaaaactctcaaggatcttaccgctgttgagatccagttcgatgtaacccactcgtgcacccaactgatcttcagcatcttttactttcaccagcgtttctgggtgagcaaaaacaggaaggcaaaatgccgcaaaaaagggaataagggcgacacggaaatgttgaatactcatactcttcctttttcaatattattgaagcatttatcagggttattgtctcatgagcggatacatatttgaatgtatttagaaaaataaacaaataggggttccgcgcacatttccccgaaaagtgccacctgacgtctaagaaaccattattatcatgacattaacctataaaaataggcgtatcacgaggccctttcgtc

SEQ ID NO: 678 - DNA, 20 bp, Artificial Sequence
  Description of Artificial Sequence: Synthetic oligonucleotide
gaagcaagagacgttctagg

SEQ ID NO: 679 - DNA, 76 bp, Artificial Sequence
  Description of Artificial Sequence: Synthetic oligonucleotide
gttttagagctagaaatagcaagttaaaataaggctagtccgttatcaacttgaaaaagtggcaccgagtcggtgc

SEQ ID NO: 680 - DNA, 96 bp, Artificial Sequence
  Description of Artificial Sequence: Synthetic oligonucleotide
gaagcaagagacgttctagggttttagagctagaaatagcaagttaaaataaggctagtccgttatcaacttgaaaaagtggcaccgagtcggtgc

SEQ ID NO: 681 - DNA, 8569 bp, Artificial Sequence
  Description of Artificial Sequence: Synthetic polynucleotide
tcgcgcgtttcggtgatgacggtgaaaacctctgacacatgcagctcccggagacggtcacagcttgtctgtaagcggatgccgggagcagacaagcccgtcagggcgcgtcagcgggtgttggcgggtgtcggggctggcttaactatgcggcatcagagcagattgtactgagagtgcaccatatgcggtgtgaaataccgcacagatgcgtaaggagaaaataccgcatcaggcgccattcgccattcaggctgcgcaactgttgggaagggcgatcggtgcgggcctcttcgctattacgccagctggcgaaagggggatgtgctgcaaggcgattaagttgggtaacgccagggttttcccagtcacgacgttgtaaaacgacggccagtgaattctaaagatctggcgcgccggcccgggctggttattgtttttgtcaatgagctatcttttagtcttatgttattggtgaatctgtccttaagttgcatcatttaacacatctcctcattagagaaaaaaattcttccctaaacgattggtagtaaaaacatctaataagaaataagaaagaaaaattaggaaaaaggaaagttcattaaaaaaaatattttgaattattttttaaaaaatatctaaatattttttaaatgaataattttatataaactgtaactaaatgtatacaagtaatgtatgttaaaaaaatacttgaaaaatctactgaaaatatatcttacaaggtgaaattaaataagaaagaatttagtggaataattatgattttatttaaaaaataattattaaagatttttttgctccataataagaaaacttttcaattattcttttctggtccataataaaaaaaatctagcatgacagcttttccatagatttttaataatgtaaaagcagccgacttcaggcaatggatagtggggcccgtatcaacttcggacgctccacttgcaacggggtgggcccaatataacaacgacgtcgtaacagataaagcgaagattgaaggtgcatgtgactccgtcaagattacgaaaccgccaactaccacgcaaattgcaattctcaatttcctagaaggactctccgaaaatgcatccaataccaaatattacccgtgtcataggcaccaagtgacaccatacatgaacacgcgtcacaatatgactggagaagggttccacaccttatgctataaaacgccccacacccctcctccttccttcgcagttcaattccaatatattccattctctctgtgtatttccctacctctcccttcaaggttagtcgatttcttctgtttttcttcttcgttctttccatgaattgtgtatgttctttgatcaatacgatgttgatttgattgtgttttgtttggtttcatcgatcttcaattttcataatcagattcagcttttattatctttacaacaacgtccttaatttgatgattctttaatcgtagatttgctctaattagagctttttcatgtcagatccctttacaacaagccttaattgttgattcattaatcgtagattagggcttttttcattgattacttcagatccgttaaacgtaaccatagatcagggctttttcatgaattacttcagatccgttaaacaacagccttattttttatacttctgtggtttttcaagaaattgttcagatccgttgacaaaaagccttattcgttgattctatatcgtttttcgagagatattgctcagatgtgttagcaactgccttgtttgttgattctattgccgtggattagggttttttttcacgagattgcttcagatccgtacttaagattacgtaatggattttgattctgatttatctgtgattgttgactcgacaggatcggtaccccatggataagaagtactctatcggactcgatatcggaactaactctgtgggatgggctgtgatcaccgatgagtacaaggtgccatctaagaagttcaaggttctcggaaacaccgataggcactctatcaagaaaaaccttatcggtgctctcctcttcgattctggtgaaactgctgaggctaccagactcaagagaaccgctagaagaaggtacaccagaagaaagaacaggatctgctacctccaagagatcttctctaacgagatggctaaagtggatgattcattcttccacaggctcgaagagtcattcctcgtggaagaagataagaagcacgagaggcaccctatcttcggaaacatcgttgatgaggtggcataccacgagaagtaccctactatctaccacctcagaaagaagctcgttgattctactgataaggctgatctcaggctcatctacctcgctctcgctcacatgatcaagttcagaggacacttcctcatcgagggtgatctcaaccctgataactctgatgtggataagttgttcatccagctcgtgcagacctacaaccagcttttcgaagagaaccctatcaacgcttcaggtgtggatgctaaggctatcctctctgctaggctctctaagtcaagaaggcttgagaacctcattgctcagctccctggtgagaagaagaacggacttttcggaaacttgatcgctctctctctcggactcacccctaacttcaagtctaacttcgatctcgctgaggatgcaaagctccagctctcaaaggatacctacgatgatgatctcgataacctcctcgctcagatcggagatcagtacgctgatttgttcctcgctgctaagaacctctctgatgctatcctcctcagtgatatcctcagagtgaacaccgagatcaccaaggctccactctcagcttctatgatcaagagatacgatgagcaccaccaggatctcacacttctcaaggctcttgttagacagcagctcccagagaagtacaaagagattttcttcgatcagtctaagaacggatacgctggttacatcgatggtggtgcatctcaagaagagttctacaagttcatcaagcctatcctcgagaagatggatggaaccgaggaactcctcgtgaagctcaatagagaggatcttctcagaaagcagaggaccttcgataacggatctatccctcatcagatccacctcggagagttgcacgctatccttagaaggcaagaggatttctacccattcctcaaggataacagggaaaagattgagaagattctcaccttcagaatcccttactacgtgggacctctcgctagaggaaactcaagattcgcttggatgaccagaaagtctgaggaaaccatcaccccttggaacttcgaagaggtggtggataagggtgctagtgctcagtctttcatcgagaggatgaccaacttcgataagaaccttccaaacgagaaggtgctccctaagcactctttgctctacgagtacttcaccgtgtacaacgagttgaccaaggttaagtacgtgaccgagggaatgaggaagcctgcttttttgtcaggtgagcaaaagaaggctatcgttgatctcttgttcaagaccaacagaaaggtgaccgtgaagcagctcaaagaggattacttcaagaaaatcgagtgcttcgattcagttgagatttctggtgttgaggataggttcaacgcatctctcggaacctaccacgatctcctcaagatcattaaggataaggatttcttggataacgaggaaaacgaggatatcttggaggatatcgttcttaccctcaccctctttgaagatagagagatgattgaagaaaggctcaagacctacgctcatctcttcgatgataaggtgatgaagcagttgaagagaagaagatacactggttggggaaggctctcaagaaagctcattaacggaatcagggataagcagtctggaaagacaatccttgatttcctcaagtctgatggattcgctaacagaaacttcatgcagctcatccacgatgattctctcacctttaaagaggatatccagaaggctcaggtttcaggacagggtgatagtctccatgagcatatcgctaacctcgctggatctcctgcaatcaagaagggaatcctccagactgtgaaggttgtggatgagttggtgaaggtgatgggaaggcataagcctgagaacatcgtgatcgaaatggctagagagaaccagaccactcagaagggacagaagaactctagggaaaggatgaagaggatcgaggaaggtatcaaagagcttggatctcagatcctcaaagagcaccctgttgagaacactcagctccagaatgagaagctctacctctactacctccagaacggaagggatatgtatgtggatcaagagttggatatcaacaggctctctgattacgatgttgatcatatcgtgccacagtcattcttgaaggatgattctatcgataacaaggtgctcaccaggtctgataagaacaggggtaagagtgataacgtgccaagtgaagaggttgtgaagaaaatgaagaactattggaggcagctcctcaacgctaagctcatcactcagagaaagttcgataacttgactaaggctgagaggggaggactctctgaattggataaggcaggattcatcaagaggcagcttgtggaaaccaggcagatcactaagcacgttgcacagatcctcgattctaggatgaacaccaagtacgatgagaacgataagttgatcagggaagtgaaggttatcaccctcaagtcaaagctcgtgtctgatttcagaaaggatttccaattctacaaggtgagggaaatcaacaactaccaccacgctcacgatgcttaccttaacgctgttgttggaaccgctctcatcaagaagtatcctaagctcgagtcagagttcgtgtacggtgattacaaggtgtacgatgtgaggaagatgatcgctaagtctgagcaagagatcggaaaggctaccgctaagtatttcttctactctaacatcatgaatttcttcaagaccgagattaccctcgctaacggtgagatcagaaagaggccactcatcgagacaaacggtgaaacaggtgagatcgtgtgggataagggaagggatttcgctaccgttagaaaggtgctctctatgccacaggtgaacatcgttaagaaaaccgaggtgcagaccggtggattctctaaagagtctatcctccctaagaggaactctgataagctcattgctaggaagaaggattgggaccctaagaaatacggtggtttcgattctcctaccgtggcttactctgttctcgttgtggctaaggttgagaagggaaagagtaagaagctcaagtctgttaaggaacttctcggaatcactatcatggaaaggtcatctttcgagaagaacccaatcgatttcctcgaggctaagggatacaaagaggttaagaaggatctcatcatcaagctcccaaagtactcactcttcgaactcgagaacggtagaaagaggatgctcgcttctgctggtgagcttcaaaagggaaacgagcttgctctcccatctaagtacgttaactttctttacctcgcttctcactacgagaagttgaagggatctccagaagataacgagcagaagcaacttttcgttgagcagcacaagcactacttggatgagatcatcgagcagatctctgagttctctaaaagggtgatcctcgctgatgcaaacctcgataaggtgttgtctgcttacaacaagcacagagataagcctatcagggaacaggcagagaacatcatccatctcttcacccttaccaacctcggtgctcctgctgctttcaagtacttcgatacaaccatcgataggaagagatacacctctaccaaagaagtgctcgatgctaccctcatccatcagtctatcactggactctacgagactaggatcgatctctcacagctcggtggtgattcaagggctgatcctaagaagaagaggaaggtttgagcggccgcgatcgttcaaacatttggcaataaagtttcttaagattgaatcctgttgccggtcttgcgatgattatcatataatttctgttgaattacgttaagcatgtaataattaacatgtaatgcatgacgttatttatgagatgggtttttatgattagagtcccgcaattatacatttaatacgcgatagaaaacaaaatatagcgcgcaaactaggataaattatcgcgcgcggtgtcatctatgttactagatcggatccgcatgcaagcttggcgtaatcatggtcatagctgtttcctgtgtgaaattgttatccgctcacaattccacacaacatacgagccggaagcataaagtgtaaagcctggggtgcctaatgagtgagctaactcacattaattgcgttgcgctcactgcccgctttccagtcgggaaacctgtcgtgccagctgcattaatgaatcggccaacgcgcggggagaggcggtttgcgtattgggcgctcttccgcttcctcgctcactgactcgctgcgctcggtcgttcggctgcggcgagcggtatcagctcactcaaaggcggtaatacggttatccacagaatcaggggataacgcaggaaagaacatgtgagcaaaaggccagcaaaaggccaggaaccgtaaaaaggccgcgttgctggcgtttttccataggctccgcccccctgacgagcatcacaaaaatcgacgctcaagtcagaggtggcgaaacccgacaggactataaagataccaggcgtttccccctggaagctccctcgtgcgctctcctgttccgaccctgccgcttaccggatacctgtccgcctttctcccttcgggaagcgtggcgctttctcatagctcacgctgtaggtatctcagttcggtgtaggtcgttcgctccaagctgggctgtgtgcacgaaccccccgttcagcccgaccgctgcgccttatccggtaactatcgtcttgagtccaacccggtaagacacgacttatcgccactggcagcagccactggtaacaggattagcagagcgaggtatgtaggcggtgctacagagttcttgaagtggtggcctaactacggctacactagaagaacagtatttggtatctgcgctctgctgaagccagttaccttcggaaaaagagttggtagctcttgatccggcaaacaaaccaccgctggtagcggtggtttttttgtttgcaagcagcagattacgcgcagaaaaaaaggatctcaagaagatcctttgatcttttctacggggtctgacgctcagtggaacgaaaactcacgttaagggattttggtcatgagattatcaaaaaggatcttcacctagatccttttaaattaaaaatgaagttttaaatcaatctaaagtatatatgagtaaacttggtctgacagttaccaatgcttaatcagtgaggcacctatctcagcgatctgtctatttcgttcatccatagttgcctgactccccgtcgtgtagataactacgatacgggagggcttaccatctggccccagtgctgcaatgataccgcgagacccacgctcaccggctccagatttatcagcaataaaccagccagccggaagggccgagcgcagaagtggtcctgcaactttatccgcctccatccagtctattaattgttgccgggaagctagagtaagtagttcgccagttaatagtttgcgcaacgttgttgccattgctacaggcatcgtggtgtcacgctcgtcgtttggtatggcttcattcagctccggttcccaacgatcaaggcgagttacatgatcccccatgttgtgcaaaaaagcggttagctccttcggtcctccgatcgttgtcagaagtaagttggccgcagtgttatcactcatggttatggcagcactgcataattctcttactgtcatgccatccgtaagatgcttttctgtgactggtgagtactcaaccaagtcattctgagaatagtgtatgcggcgaccgagttgctcttgcccggcgtcaatacgggataataccgcgccacatagcagaactttaaaagtgctcatcattggaaaacgttcttcggggcgaaaactctcaaggatcttaccgctgttgagatccagttcgatgtaacccactcgtgcacccaactgatcttcagcatcttttactttcaccagcgtttctgggtgagcaaaaacaggaaggcaaaatgccgcaaaaaagggaataagggcgacacggaaatgttgaatactcatactcttcctttttcaatattattgaagcatttatcagggttattgtctcatgagcggatacatatttgaatgtatttagaaaaataaacaaataggggttccgcgcacatttccccgaaaagtgccacctgacgtctaagaaaccattattatcatgacattaacctataaaaataggcgtatcacgaggccctttcgtc

SEQ ID NO: 682 - DNA, 4104 bp, Artificial Sequence
  Description of Artificial Sequence: Synthetic polynucleotide
atggataagaagtactctatcggactcgatatcggaactaactctgtgggatgggctgtgatcaccgatgagtacaaggtgccatctaagaagttcaaggttctcggaaacaccgataggcactctatcaagaaaaaccttatcggtgctctcctcttcgattctggtgaaactgctgaggctaccagactcaagagaaccgctagaagaaggtacaccagaagaaagaacaggatctgctacctccaagagatcttctctaacgagatggctaaagtggatgattcattcttccacaggctcgaagagtcattcctcgtggaagaagataagaagcacgagaggcaccctatcttcggaaacatcgttgatgaggtggcataccacgagaagtaccctactatctaccacctcagaaagaagctcgttgattctactgataaggctgatctcaggctcatctacctcgctctcgctcacatgatcaagttcagaggacacttcctcatcgagggtgatctcaaccctgataactctgatgtggataagttgttcatccagctcgtgcagacctacaaccagcttttcgaagagaaccctatcaacgcttcaggtgtggatgctaaggctatcctctctgctaggctctctaagtcaagaaggcttgagaacctcattgctcagctccctggtgagaagaagaacggacttttcggaaacttgatcgctctctctctcggactcacccctaacttcaagtctaacttcgatctcgctgaggatgcaaagctccagctctcaaaggatacctacgatgatgatctcgataacctcctcgctcagatcggagatcagtacgctgatttgttcctcgctgctaagaacctctctgatgctatcctcctcagtgatatcctcagagtgaacaccgagatcaccaaggctccactctcagcttctatgatcaagagatacgatgagcaccaccaggatctcacacttctcaaggctcttgttagacagcagctcccagagaagtacaaagagattttcttcgatcagtctaagaacggatacgctggttacatcgatggtggtgcatctcaagaagagttctacaagttcatcaagcctatcctcgagaagatggatggaaccgaggaactcctcgtgaagctcaatagagaggatcttctcagaaagcagaggaccttcgataacggatctatccctcatcagatccacctcggagagttgcacgctatccttagaaggcaagaggatttctacccattcctcaaggataacagggaaaagattgagaagattctcaccttcagaatcccttactacgtgggacctctcgctagaggaaactcaagattcgcttggatgaccagaaagtctgaggaaaccatcaccccttggaacttcgaagaggtggtggataagggtgctagtgctcagtctttcatcgagaggatgaccaacttcgataagaaccttccaaacgagaaggtgctccctaagcactctttgctctacgagtacttcaccgtgtacaacgagttgaccaaggttaagtacgtgaccgagggaatgaggaagcctgcttttttgtcaggtgagcaaaagaaggctatcgttgatctcttgttcaagaccaacagaaaggtgaccgtgaagcagctcaaagaggattacttcaagaaaatcgagtgcttcgattcagttgagatttctggtgttgaggataggttcaacgcatctctcggaacctaccacgatctcctcaagatcattaaggataaggatttcttggataacgaggaaaacgaggatatcttggaggatatcgttcttaccctcaccctctttgaagatagagagatgattgaagaaaggctcaagacctacgctcatctcttcgatgataaggtgatgaagcagttgaagagaagaagatacactggttggggaaggctctcaagaaagctcattaacggaatcagggataagcagtctggaaagacaatccttgatttcctcaagtctgatggattcgctaacagaaacttcatgcagctcatccacgatgattctctcacctttaaagaggatatccagaaggctcaggtttcaggacagggtgatagtctccatgagcatatcgctaacctcgctggatctcctgcaatcaagaagggaatcctccagactgtgaaggttgtggatgagttggtgaaggtgatgggaaggcataagcctgagaacatcgtgatcgaaatggctagagagaaccagaccactcagaagggacagaagaactctagggaaaggatgaagaggatcgaggaaggtatcaaagagcttggatctcagatcctcaaagagcaccctgttgagaacactcagctccagaatgagaagctctacctctactacctccagaacggaagggatatgtatgtggatcaagagttggatatcaacaggctctctgattacgatgttgatcatatcgtgccacagtcattcttgaaggatgattctatcgataacaaggtgctcaccaggtctgataagaacaggggtaagagtgataacgtgccaagtgaagaggttgtgaagaaaatgaagaactattggaggcagctcctcaacgctaagctcatcactcagagaaagttcgataacttgactaaggctgagaggggaggactctctgaattggataaggcaggattcatcaagaggcagcttgtggaaaccaggcagatcactaagcacgttgcacagatcctcgattctaggatgaacaccaagtacgatgagaacgataagttgatcagggaagtgaaggttatcaccctcaagtcaaagctcgtgtctgatttcagaaaggatttccaattctacaaggtgagggaaatcaacaactaccaccacgctcacgatgcttaccttaacgctgttgttggaaccgctctcatcaagaagtatcctaagctcgagtcagagttcgtgtacggtgattacaaggtgtacgatgtgaggaagatgatcgctaagtctgagcaagagatcggaaaggctaccgctaagtatttcttctactctaacatcatgaatttcttcaagaccgagattaccctcgctaacggtgagatcagaaagaggccactcatcgagacaaacggtgaaacaggtgagatcgtgtgggataagggaagggatttcgctaccgttagaaaggtgctctctatgccacaggtgaacatcgttaagaaaaccgaggtgcagaccggtggattctctaaagagtctatcctccctaagaggaactctgataagctcattgctaggaagaaggattgggaccctaagaaatacggtggtttcgattctcctaccgtggcttactctgttctcgttgtggctaaggttgagaagggaaagagtaagaagctcaagtctgttaaggaacttctcggaatcactatcatggaaaggtcatctttcgagaagaacccaatcgatttcctcgaggctaagggatacaaagaggttaagaaggatctcatcatcaagctcccaaagtactcactcttcgaactcgagaacggtagaaagaggatgctcgcttctgctggtgagcttcaaaagggaaacgagcttgctctcccatctaagtacgttaactttctttacctcgcttctcactacgagaagttgaagggatctccagaagataacgagcagaagcaacttttcgttgagcagcacaagcactacttggatgagatcatcgagcagatctctgagttctctaaaagggtgatcctcgctgatgcaaacctcgataaggtgttgtctgcttacaacaagcacagagataagcctatcagggaacaggcagagaacatcatccatctcttcacccttaccaacctcggtgctcctgctgctttcaagtacttcgatacaaccatcgataggaagagatacacctctaccaaagaagtgctcgatgctaccctcatccatcagtctatcactggactctacgagactaggatcgatctctcacagctcggtggtgat

SEQ ID NO: 683 - protein, 1368 aa, Streptococcus pyogenes [sequence omitted]

SEQ ID NO: 684 - DNA, 21 bp, Simian virus 40
cctaagaagaagaggaaggtt

SEQ ID NO: 685 - protein, 7 aa, Simian virus 40
PKKKRKV

SEQ ID NO: 686 - DNA, 4137 bp, Artificial Sequence
  Description of Artificial Sequence: Synthetic polynucleotide
atggataagaagtactctatcggactcgatatcggaactaactctgtgggatgggctgtgatcaccgatgagtacaaggtgccatctaagaagttcaaggttctcggaaacaccgataggcactctatcaagaaaaaccttatcggtgctctcctcttcgattctggtgaaactgctgaggctaccagactcaagagaaccgctagaagaaggtacaccagaagaaagaacaggatctgctacctccaagagatcttctctaacgagatggctaaagtggatgattcattcttccacaggctcgaagagtcattcctcgtggaagaagataagaagcacgagaggcaccctatcttcggaaacatcgttgatgaggtggcataccacgagaagtaccctactatctaccacctcagaaagaagctcgttgattctactgataaggctgatctcaggctcatctacctcgctctcgctcacatgatcaagttcagaggacacttcctcatcgagggtgatctcaaccctgataactctgatgtggataagttgttcatccagctcgtgcagacctacaaccagcttttcgaagagaaccctatcaacgcttcaggtgtggatgctaaggctatcctctctgctaggctctctaagtcaagaaggcttgagaacctcattgctcagctccctggtgagaagaagaacggacttttcggaaacttgatcgctctctctctcggactcacccctaacttcaagtctaacttcgatctcgctgaggatgcaaagctccagctctcaaaggatacctacgatgatgatctcgataacctcctcgctcagatcggagatcagtacgctgatttgttcctcgctgctaagaacctctctgatgctatcctcctcagtgatatcctcagagtgaacaccgagatcaccaaggctccactctcagcttctatgatcaagagatacgatgagcaccaccaggatctcacacttctcaaggctcttgttagacagcagctcccagagaagtacaaagagattttcttcgatcagtctaagaacggatacgctggttacatcgatggtggtgcatctcaagaagagttctacaagttcatcaagcctatcctcgagaagatggatggaaccgaggaactcctcgtgaagctcaatagagaggatcttctcagaaagcagaggaccttcgataacggatctatccctcatcagatccacctcggagagttgcacgctatccttagaaggcaagaggatttctacccattcctcaaggataacagggaaaagattgagaagattctcaccttcagaatcccttactacgtgggacctctcgctagaggaaactcaagattcgcttggatgaccagaaagtctgaggaaaccatcaccccttggaacttcgaagaggtggtggataagggtgctagtgctcagtctttcatcgagaggatgaccaacttcgataagaaccttccaaacgagaaggtgctccctaagcactctttgctctacgagtacttcaccgtgtacaacgagttgaccaaggttaagtacgtgaccgagggaatgaggaagcctgcttttttgtcaggtgagcaaaagaaggctatcgttgatctcttgttcaagaccaacagaaaggtgaccgtgaagcagctcaaagaggattacttcaagaaaatcgagtgcttcgattcagttgagatttctggtgttgaggataggttcaacgcatctctcggaacctaccacgatctcctcaagatcattaaggataaggatttcttggataacgaggaaaacgaggatatcttggaggatatcgttcttaccctcaccctctttgaagatagagagatgattgaagaaaggctcaagacctacgctcatctcttcgatgataaggtgatgaagcagttgaagagaagaagatacactggttggggaaggctctcaagaaagctcattaacggaatcagggataagcagtctggaaagacaatccttgatttcctcaagtctgatggattcgctaacagaaacttcatgcagctcatccacgatgattctctcacctttaaagaggatatccagaaggctcaggtttcaggacagggtgatagtctccatgagcatatcgctaacctcgctggatctcctgcaatcaagaagggaatcctccagactgtgaaggttgtggatgagttggtgaaggtgatgggaaggcataagcctgagaacatcgtgatcgaaatggctagagagaaccagaccactcagaagggacagaagaactctagggaaaggatgaagaggatcgaggaaggtatcaaagagcttggatctcagatcctcaaagagcaccctgttgagaacactcagctccagaatgagaagctctacctctactacctccagaacggaagggatatgtatgtggatcaagagttggatatcaacaggctctctgattacgatgttgatcatatcgtgccacagtcattcttgaaggatgattctatcgataacaaggtgctcaccaggtctgataagaacaggggtaagagtgataacgtgccaagtgaagaggttgtgaagaaaatgaagaactattggaggcagctcctcaacgctaagctcatcactcagagaaagttcgataacttgactaaggctgagaggggaggactctctgaattggataaggcaggattcatcaagaggcagcttgtggaaaccaggcagatcactaagcacgttgcacagatcctcgattctaggatgaacaccaagtacgatgagaacgataagttgatcagggaagtgaaggttatcaccctcaagtcaaagctcgtgtctgatttcagaaaggatttccaattctacaaggtgagggaaatcaacaactaccaccacgctcacgatgcttaccttaacgctgttgttggaaccgctctcatcaagaagtatcctaagctcgagtcagagttcgtgtacggtgattacaaggtgtacgatgtgaggaagatgatcgctaagtctgagcaagagatcggaaaggctaccgctaagtatttcttctactctaacatcatgaatttcttcaagaccgagattaccctcgctaacggtgagatcagaaagaggccactcatcgagacaaacggtgaaacaggtgagatcgtgtgggataagggaagggatttcgctaccgttagaaaggtgctctctatgccacaggtgaacatcgttaagaaaaccgaggtgcagaccggtggattctctaaagagtctatcctccctaagaggaactctgataagctcattgctaggaagaaggattgggaccctaagaaatacggtggtttcgattctcctaccgtggcttactctgttctcgttgtggctaaggttgagaagggaaagagtaagaagctcaagtctgttaaggaacttctcggaatcactatcatggaaaggtcatctttcgagaagaacccaatcgatttcctcgaggctaagggatacaaagaggttaagaaggatctcatcatcaagctcccaaagtactcactcttcgaactcgagaacggtagaaagaggatgctcgcttctgctggtgagcttcaaaagggaaacgagcttgctctcccatctaagtacgttaactttctttacctcgcttctcactacgagaagttgaagggatctccagaagataacgagcagaagcaacttttcgttgagcagcacaagcactacttggatgagatcatcgagcagatctctgagttctctaaaagggtgatcctcgctgatgcaaacctcgataaggtgttgtctgcttacaacaagcacagagataagcctatcagggaacaggcagagaacatcatccatctcttcacccttaccaacctcggtgctcctgctgctttcaagtacttcgatacaaccatcgataggaagagatacacctctaccaaagaagtgctcgatgctaccctcatccatcagtctatcactggactctacgagactaggatcgatctctcacagctcggtggtgattcaagggctgatcctaagaagaagaggaaggtt

SEQ ID NO: 687 - protein, 1379 aa, Artificial Sequence
  Description of Artificial Sequence: Synthetic polypeptide
MDKKYSIGLDIGTNSVGWAVITDEYKVPSKKFKVLGNTDRHSIKKNLIGALLFDSGETAEATRLKRTARRRYTRRKNRICYLQEIFSNEMAKVDDSFFHRLEESFLVEEDKKHERHPIFGNIVDEVAYHEKYPTIYHLRKKLVDSTDKADLRLIYLALAHMIKFRGHFLIEGDLNPDNSDVDKLFIQLVQTYNQLFEENPINASGVDAKAILSARLSKSRRLENLIAQLPGEKKNGLFGNLIALSLGLTPNFKSNFDLAEDAKLQLSKDTYDDDLDNLLAQIGDQYADLFLAAKNLSDAILLSDILRVNTEITKAPLSASMIKRYDEHHQDLTLLKALVRQQLPEKYKEIFFDQSKNGYAGYIDGGASQEEFYKFIKPILEKMDGTEELLVKLNREDLLRKQRTFDNGSIPHQIHLGELHAILRRQEDFYPFLKDNREKIEKILTFRIPYYVGPLARGNSRFAWMTRKSEETITPWNFEEVVDKGASAQSFIERMTNFDKNLPNEKVLPKHSLLYEYFTVYNELTKVKYVTEGMRKPAFLSGEQKKAIVDLLFKTNRKVTVKQLKEDYFKKIECFDSVEISGVEDRFNASLGTYHDLLKIIKDKDFLDNEENEDILEDIVLTLTLFEDREMIEERLKTYAHLFDDKVMKQLKRRRYTGWGRLSRKLINGIRDKQSGKTILDFLKSDGFANRNFMQLIHDDSLTFKEDIQKAQVSGQGDSLHEHIANLAGSPAIKKGILQTVKVVDELVKVMGRHKPENIVIEMARENQTTQKGQKNSRERMKRIEEGIKELGSQILKEHPVENTQLQNEKLYLYYLQNGRDMYVDQELDINRLSDYDVDHIVPQSFLKDDSIDNKVLTRSDKNRGKSDNVPSEEVVKKMKNYWRQLLNAKLITQRKFDNLTKAERGGLSELDKAGFIKRQLVETRQITKHVAQILDSRMNTKYDENDKLIREVKVITLKSKLVSDFRKDFQFYKVREINNYHHAHDAYLNAVVGTALIKKYPKLESEFVYGDYKVYDVRKMIAKSEQEIGKATAKYFFYSNIMNFFKTEITLANGEIRKRPLIETNGETGEIVWDKGRDFATVRKVLSMPQVNIVKKTEVQTGGFSKESILPKRNSDKLIARKKDWDPKKYGGFDSPTVAYSVLVVAKVEKGKSKKLKSVKELLGITIMERSSFEKNPIDFLEAKGYKEVKKDLIIKLPKYSLFELENGRKRMLASAGELQKGNELALPSKYVNFLYLASHYEKLKGSPEDNEQKQLFVEQHKHYLDEIIEQISEFSKRVILADANLDKVLSAYNKHRDKPIREQAENIIHLFTLTNLGAPAAFKYFDTTIDRKRYTSTKEVLDATLIHQSITGLYETRIDLSQLGGDSRADPKKKRKV

SEQ ID NO: 688 - protein, 13 aa, Human immunodeficiency virus
GRKKRRQRRRPPQ

SEQ ID NO: 689 - protein, 12 aa, Human immunodeficiency virus
GRKKRRQRRRPQ

SEQ ID NO: 690 - protein, 11 aa, Human immunodeficiency virus
YGRKKRRQRRR

SEQ ID NO: 691 - protein, 18 aa, Unknown
  Description of Unknown: MAP (KLAL) sequence
KLALKLALKALKAALKLA

SEQ ID NO: 692 - protein, 16 aa, Unknown
  Description of Unknown: Penetratin-Arg sequence
RQIRIWFQNRRMRWRR

SEQ ID NO: 693 - protein, 17 aa, Unknown
  Description of Unknown: antitrypsin (358-374) sequence
CSIPPEVKFNKPFVYLI

SEQ ID NO: 694 - protein, 30 aa, Unknown
  Description of Unknown: TAT-HA2 Fusion sequence
RRRQRRKKRGGDIMGEWGNEIFGAIAGFLG

SEQ ID NO: 695 - protein, 13 aa, Unknown
  Description of Unknown: Temporin L, amide sequence
FVQWFSKFLGRIL

SEQ ID NO: 696 - protein, 18 aa, Unknown
  Description of Unknown: pVEC (Cadherin-5) sequence
LLIILRRRIRKQAHAHSK

SEQ ID NO: 697 - protein, 24 aa, Unknown
  Description of Unknown: Calcitonin sequence
LGTYTQDFNKFHTFPQTAIGVGAP

SEQ ID NO: 698 - protein, 30 aa, Unknown
  Description of Unknown: Neurturin sequence
GAAEAAARVYDLGLRRLRQRRRLRRERVRA

SEQ ID NO: 699 - protein, 27 aa, Homo sapiens
MGLGLHLLVLAAALQGAWSQPKKKRKV

SEQ ID NO: 700 - protein, 18 aa, Unknown
  Description of Unknown: Penetratin sequence
RQIKIWFQNRRMKWKKGG

SEQ ID NO: 701 - protein, 8 aa, Artificial Sequence
  Description of Artificial Sequence: Synthetic peptide
RRRRRRRR

SEQ ID NO: 702 - protein, 9 aa, Artificial Sequence
  Description of Artificial Sequence: Synthetic peptide
RRRRRRRRR

SEQ ID NO: 703 - protein, 30 aa, Artificial Sequence
  Description of Artificial Sequence: Synthetic polypeptide
KKLFKKILKYLKKLFKKILKYLKKKKKKKK

SEQ ID NO: 704 - DNA, 14548 bp, Artificial Sequence
  Description of Artificial Sequence: Synthetic polynucleotide
  modified_base (13426)..(13426): a, c, t, g, unknown or other
agtactttgatccaacccctccgctgctatagtgcagtcggcttctgacgttcagtgcagccgtcttctgaaaacgacatgtcgcacaagtcctaagttacgcgacaggctgccgccctgcccttttcctggcgttttcttgtcgcgtgttttagtcgcataaagtagaatacttgcgactagaaccggagacattacgccatgaacaagagcgccgccgctggcctgctgggctatgcccgcgtcagcaccgacgaccaggacttgaccaaccaacgggccgaactgcacgcggccggctgcaccaagctgttttccgagaagatcaccggcaccaggcgcgaccgcccggagctggccaggatgcttgaccacctacgccctggcgacgttgtgacagtgaccaggctagaccgcctggcccgcagcacccgcgacctactggacattgccgagcgcatccaggaggccggcgcgggcctgcgtagcctggcagagccgtgggccgacaccaccacgccggccggccgcatggtgttgaccgtgttcgccggcattgccgagttcgagcgttccctaatcatcgaccgcacccggagcgggcgcgaggccgccaaggcccgaggcgtgaagtttggcccccgccctaccctcaccccggcacagatcgcgcacgcccgcgagctgatcgaccaggaaggccgcaccgtgaaagaggcggctgcactgcttggcgtgcatcgctcgaccctgtaccgcgcacttgagcgcagcgaggaagtgacgcccaccgaggccaggcggcgcggtgccttccgtgaggacgcattgaccgaggccgacgccctggcggccgccgagaatgaacgccaagaggaacaagcatgaaaccgcaccaggacggccaggacgaaccgtttttcattaccgaagagatcgaggcggagatgatcgcggccgggtacgtgttcgagccgcccgcgcacgtctcaaccgtgcggctgcatgaaatcctggccggtttgtctgatgccaagctggcggcctggccggccagcttggccgctgaagaaaccgagcgccgccgtctaaaaaggtgatgtgtatttgagtaaaacagcttgcgtcatgcggtcgctgcgtatatgatgcgatgagtaaataaacaaatacgcaaggggaacgcatgaaggttatcgctgtacttaaccagaaaggcgggtcaggcaagacgaccatcgcaacccatctagcccgcgccctgcaactcgccggggccgatgttctgttagtcgattccgatccccagggcagtgcccgcgattgggcggccgtgcgggaagatcaaccgctaaccgttgtcggcatcgaccgcccgacgattgaccgcgacgtgaaggccatcggccggcgcgacttcgtagtgatcgacggagcgccccaggcggcggacttggctgtgtccgcgatcaaggcagccgacttcgtgctgattccggtgcagccaagcccttacgacatatgggccaccgccgacctggtggagctggttaagcagcgcattgaggtcacggatggaaggctacaagcggcctttgtcgtgtcgcgggcgatcaaaggcacgcgcatcggcggtgaggttgccgaggcgctggccgggtacgagctgcccattcttgagtcccgtatcacgcagcgcgtgagctacccaggcactgccgccgccggcacaaccgttcttgaatcagaacccgagggcgacgctgcccgcgaggtccaggcgctggccgctgaaattaaatcaaaactcatttgagttaatgaggtaaagagaaaatgagcaaaagcacaaacacgctaagtgccggccgtccgagcgcacgcagcagcaaggctgcaacgttggccagcctggcagacacgccagccatgaagcgggtcaactttcagttgccggcggaggatcacaccaagctgaagatgtacgcggtacgccaaggcaagaccattaccgagctgctatctgaatacatcgcgcagctaccagagtaaatgagcaaatgaataaatgagtagatgaattttagcggctaaaggaggcggcatggaaaatcaagaacaaccaggcaccgacgccgtggaatgccccatgtgtggaggaacgggcggttggccaggcgtaagcggctgggttgtctgccggccctgcaatggcactggaacccccaagcccgaggaatcggcgtgacggtcgcaaaccatccggcccggtacaaatcggcgcggcgctgggtgatgacctggtggagaagttgaaggccgcgcaggccgcccagcggcaacgcatcgaggcagaagcacgccccggtgaatcgtggcaagcggccgctgatcgaatccgcaaagaatcccggcaaccgccggcagccggtgcgccgtcgattaggaagccgcccaagggcgacgagcaaccagattttttcgttccgatgctctatgacgtgggcacccgcgatagtcgcagcatcatggacgtggccgttttccgtctgtcgaagcgtgaccgacgagctggcgaggtgatccgctacgagcttccagacgggcacgtagaggtttccgcagggccggccggcatggccagtgtgtgggattacgacctggtactgatggcggtttcccatctaaccgaatccatgaaccgataccgggaagggaagggagacaagcccggccgcgtgttccgtccacacgttgcggacgtactcaagttctgccggcgagccgatggcggaaagcagaaagacgacctggtagaaacctgcattcggttaaacaccacgcacgttgccatgcagcgtacgaagaaggccaagaacggccgcctggtgacggtatccgagggtgaagccttgattagccgctacaagatcgtaaagagcgaaaccgggcggccggagtacatcgagatcgagctagctgattggatgtaccgcgagatcacagaaggcaagaacccggacgtgctgacggttcaccccgattactttttgatcgatcccggcatcggccgttttctctaccgcctggcacgccgcgccgcaggcaaggcagaagccagatggttgttcaagacgatctacgaacgcagtggcagcgccggagagttcaagaagttctgtttcaccgtgcgcaagctgatcgggtcaaatgacctgccggagtacgatttgaaggaggaggcggggcaggctggcccgatcctagtcatgcgctaccgcaacctgatcgagggcgaagcatccgccggttcctaatgtacggagcagatgctagggcaaattgccctagcaggggaaaaaggtcgaaaaggtctctttcctgtggatagcacgtacattgggaacccaaagccgtacattgggaaccggaacccgtacattgggaacccaaagccgtacattgggaaccggtcacacatgtaagtgactgatataaaagagaaaaaaggcgatttttccgcctaaaactctttaaaacttattaaaactcttaaaacccgcctggcctgtgcataactgtctggccagcgcacagccgaagagctgcaaaaagcgcctacccttcggtcgctgcgctccctacgccccgccgcttcgcgtcggcctatcgcggccgctggccgctcaaaaatggctggcctacggccaggcaatctaccagggcgcggacaagccgcgccgtcgccactcgaccgccggcgcccacatcaaggcaccctgcctcgcgcgtttcggtgatgacggtgaaaacctctgacacatgcagctcccggagacggtcacagcttgtctgtaagcggatgccgggagcagacaagcccgtcagggcgcgtcagcgggtgttggcgggtgtcggggcgcagccatgacccagtcacgtagcgatagcggagtgtatactggcttaactatgcggcatcagagcagattgtactgagagtgcaccatatgcggtgtgaaataccgcacagatgcgtaaggagaaaataccgcatcaggcgctcttccgcttcctcgctcactgactcgctgcgctcggtcgttcggctgcggcgagcggtatcagctcactcaaaggcggtaatacggttatccacagaatcaggggataacgcaggaaagaacatgtgagcaaaaggccagcaaaaggccaggaaccgtaaaaaggccgcgttgctggcgtttttccataggctccgcccccctgacgagcatcacaaaaatcgacgctcaagtcagaggtggcgaaacccgacaggactataaagataccaggcgtttccccctggaagctccctcgtgcgctctcctgttccgaccctgccgcttaccggatacctgtccgcctttctcccttcgggaagcgtggcgctttctcatagctcacgctgtaggtatctcagttcggtgtaggtcgttcgctccaagctgggctgtgtgcacgaaccccccgttcagcccgaccgctgcgccttatccggtaactatcgtcttgagtccaacccggtaagacacgacttatcgccactggcagcagccactggtaacaggattagcagagcgaggtatgtaggcggtgctacagagttcttgaagtggtggcctaactacggctacactagaaggacagtatttggtatctgcgctctgctgaagccagttaccttcggaaaaagagttggtagctcttgatccggcaaacaaaccaccgctggtagcggtggtttttttgtttgcaagcagcagattacgcgcagaaaaaaaggatctcaagaagatcctttgatcttttctacggggtctgacgctcagtggaacgaaaactcacgttaagggattttggtcatgcatgatatatctcccaatttgtgtagggcttattatgcacgcttaaaaataataaaagcagacttgacctgatagtttggctgtgagcaattatgtgcttagtgcatctaatcgcttgagttaacgccggcgaagcggcgtcggcttgaacgaatttctagctagacattatttgccgactaccttggtgatctcgcctttcacgtagtggacaaattcttccaactgatctgcgcgcgaggccaagcgatcttcttcttgtccaagataagcctgtctagcttcaagtatgacgggctgatactgggccggcaggcgctccattgcccagtcggcagcgacatccttcggcgcgattttgccggttactgcgctgtaccaaatgcgggacaacgtaagcactacatttcgctcatcgccagcccagtcgggcggcgagttccatagcgttaaggtttcatttagcgcctcaaatagatcctgttcaggaaccggatcaaagagttcctccgccgctggacctaccaaggcaacgctatgttctcttgcttttgtcagcaagatagccagatcaatgtcgatcgtggctggctcgaagatacctgcaagaatgtcattgcgctgccattctccaaattgcagttcgcgcttagctggataacgccacggaatgatgtcgtcgtgcacaacaatggtgacttctacagcgcggagaatctcgctctctccaggggaagccgaagtttccaaaaggtcgttgatcaaagctcgccgcgttgtttcatcaagccttacggtcaccgtaaccagcaaatcaatatcactgtgtggcttcaggccgccatccactgcggagccgtacaaatgtacggccagcaacgtcggttcgagatggcgctcgatgacgccaactacctctgatagttgagtcgatacttcggcgatcaccgcttcccccatgatgtttaactttgttttagggcgactgccctgctgcgtaacatcgttgctgctccataacatcaaacatcgacccacggcgtaacgcgcttgctgcttggatgcccgaggcatagactgtaccccaaaaaaacatgtcataacaagaagccatgaaaaccgccactgcgccgttaccaccgctgcgttcggtcaaggttctggaccagttgcgtgacggcagttacgctacttgcattacagcttacgaaccgaacgaggcttatgtccactgggttcgtgcccgaattgatcacaggcagcaacgctctgtcatcgttacaatcaacatgctaccctccgcgagatcatccgtgtttcaaacccggcagcttagttgccgttcttccgaatagcatcggtaacatgagcaaagtctgccgccttacaacggctctcccgctgacgccgtcccggactgatgggctgcctgtatcgagtggtgattttgtgccgagctgccggtcggggagctgttggctggctggtggcaggatatattgtggtgtaaacaaattgacgcttagacaacttaataacacattgcggacgtttttaatgtactgaattaacgccgaattgctctagccaatacgcaaaccgcctctccccgcgcgttggccgattcattaatgcagctggcacgacaggtttcccgactggaaagcgggcagtgagcgcaacgcaattaatgtgagttagctcactcattaggcaccccaggctttacactttatgcttccggctcgtatgttgtgtggaattgtgagcggataacaatttcacacaggaaacagctatgacatgattacgaattcaaaaattacggatatgaatataggcatatccgtatccgaattatccgtttgacagctagcaacgattgtacaattgcttctttaaaaaaggaagaaagaaagaaagaaaagaatcaacatcagcgttaacaaacggccccgttacggcccaaacggtcatatagagtaacggcgttaagcgttgaaagactcctatcgaaatacgtaaccgcaaacgtgtcatagtcagatcccctcttccttcaccgcctcaaacacaaaaataatcttctacagcctatatatacaacccccccttctatctctcctttctcacaattcatcatctttctttctctacccccaattttaagaaatcctctcttctcctcttcattttcaaggtaaatctctctctctctctctctctctgttattccttgttttaattaggtatgtattattgctagtttgttaatctgcttatcttatgtatgccttatgtgaatatctttatcttgttcatctcatccgtttagaagctataaatttgttgatttgactgtgtatctacacgtggttatgtttatatctaatcagatatgaatttcttcatattgttgcgtttgtgtgtaccaatccgaaatcgttgatttttttcatttaatcgtgtagctaattgtacgtatacatatggatctacgtatcaattgttcatctgtttgtgtttgtatgtatacagatctgaaaacatcacttctctcatctgattgtgttgttacatacatagatatagatctgttatatcattttttttattaattgtgtatatatatatgtgcatagatctggattacatgattgtgattatttacatgattttgttatttacgtatgtatatatgtagatctggactttttggagttgttgacttgattgtatttgtgtgtgtatatgtgtgttctgatcttgatatgttatgtatgtgcagcgaattcggcgcgccatggataagaagtactctatcggactcgatatcggaactaactctgtgggatgggctgtgatcaccgatgagtacaaggtgccatctaagaagttcaaggttctcggaaacaccgataggcactctatcaagaaaaaccttatcggtgctctcctcttcgattctggtgaaactgctgaggctaccagactcaagagaaccgctagaagaaggtacaccagaagaaagaacaggatctgctacctccaagagatcttctctaacgagatggctaaagtggatgattcattcttccacaggctcgaagagtcattcctcgtggaagaagataagaagcacgagaggcaccctatcttcggaaacatcgttgatgaggtggcataccacgagaagtaccctactatctaccacctcagaaagaagctcgttgattctactgataaggctgatctcaggctcatctacctcgctctcgctcacatgatcaagttcagaggacacttcctcatcgagggtgatctcaaccctgataactctgatgtggataagttgttcatccagctcgtgcagacctacaaccagcttttcgaagagaaccctatcaacgcttcaggtgtggatgctaaggctatcctctctgctaggctctctaagtcaagaaggcttgagaacctcattgctcagctccctggtgagaagaagaacggacttttcggaaacttgatcgctctctctctcggactcacccctaacttcaagtctaacttcgatctcgctgaggatgcaaagctccagctctcaaaggatacctacgatgatgatctcgataacctcctcgctcagatcggagatcagtacgctgatttgttcctcgctgctaagaacctctctgatgctatcctcctcagtgatatcctcagagtgaacaccgagatcaccaaggctccactctcagcttctatgatcaagagatacgatgagcaccaccaggatctcacacttctcaaggctcttgttagacagcagctcccagagaagtacaaagagattttcttcgatcagtctaagaacggatacgctggttacatcgatggtggtgcatctcaagaagagttctacaagttcatcaagcctatcctcgagaagatggatggaaccgaggaactcctcgtgaagctcaatagagaggatcttctcagaaagcagaggaccttcgataacggatctatccctcatcagatccacctcggagagttgcacgctatccttagaaggcaagaggatttctacccattcctcaaggataacagggaaaagattgagaagattctcaccttcagaatcccttactacgtgggacctctcgctagaggaaactcaagattcgcttggatgaccagaaagtctgaggaaaccatcaccccttggaacttcgaagaggtggtggataagggtgctagtgctcagtctttcatcgagaggatgaccaacttcgataagaaccttccaaacgagaaggtgctccctaagcactctttgctctacgagtacttcaccgtgtacaacgagttgaccaaggttaagtacgtgaccgagggaatgaggaagcctgcttttttgtcaggtgagcaaaagaaggctatcgttgatctcttgttcaagaccaacagaaaggtgaccgtgaagcagctcaaagaggattacttcaagaaaatcgagtgcttcgattcagttgagatttctggtgttgaggataggttcaacgcatctctcggaacctaccacgatctcctcaagatcattaaggataaggatttcttggataacgaggaaaacgaggatatcttggaggatatcgttcttaccctcaccctctttgaagatagagagatgattgaagaaaggctcaagacctacgctcatctcttcgatgataaggtgatgaagcagttgaagagaagaagatacactggttggggaaggctctcaagaaagctcattaacggaatcagggataagcagtctggaaagacaatccttgatttcctcaagtctgatggattcgctaacagaaacttcatgcagctcatccacgatgattctctcacctttaaagaggatatccagaaggctcaggtttcaggacagggtgatagtctccatgagcatatcgctaacctcgctggatctcctgcaatcaagaagggaatcctccagactgtgaaggttgtggatgagttggtgaaggtgatgggaaggcataagcctgagaacatcgtgatcgaaatggctagagagaaccagaccactcagaagggacagaagaactctagggaaaggatgaagaggatcgaggaaggtatcaaagagcttggatctcagatcctcaaagagcaccctgttgagaacactcagctccagaatgagaagctctacctctactacctccagaacggaagggatatgtatgtggatcaagagttggatatcaacaggctctctgattacgatgttgatcatatcgtgccacagtcattcttgaaggatgattctatcgataacaaggtgctcaccaggtctgataagaacaggggtaagagtgataacgtgccaagtgaagaggttgtgaagaaaatgaagaactattggaggcagctcctcaacgctaagctcatcactcagagaaagttcgataacttgactaaggctgagaggggaggactctctgaattggataaggcaggattcatcaagaggcagcttgtggaaaccaggcagatcactaagcacgttgcacagatcctcgattctaggatgaacaccaagtacgatgagaacgataagttgatcagggaagtgaaggttatcaccctcaagtcaaagctcgtgtctgatttcagaaaggatttccaattctacaaggtgagggaaatcaacaactaccaccacgctcacgatgcttaccttaacgctgttgttggaaccgctctcatcaagaagtatcctaagctcgagtcagagttcgtgtacggtgattacaaggtgtacgatgtgaggaagatgatcgctaagtctgagcaagagatcggaaaggctaccgctaagtatttcttctactctaacatcatgaatttcttcaagaccgagattaccctcgctaacggtgagatcagaaagaggccactcatcgagacaaacggtgaaacaggtgagatcgtgtgggataagggaagggatttcgctaccgttagaaaggtgctctctatgccacaggtgaacatcgttaagaaaaccgaggtgcagaccggtggattctctaaagagtctatcctccctaagaggaactctgataagctcattgctaggaagaaggattgggaccctaagaaatacggtggtttcgattctcctaccgtggcttactctgttctcgttgtggctaaggttgagaagggaaagagtaagaagctcaagtctgttaaggaacttctcggaatcactatcatggaaaggtcatctttcgagaagaacccaatcgatttcctcgaggctaagggatacaaagaggttaagaaggatctcatcatcaagctcccaaagtactcactcttcgaactcgagaacggtagaaagaggatgctcgcttctgctggtgagcttcaaaagggaaacgagcttgctctcccatctaagtacgttaactttctttacctcgcttctcactacgagaagttgaagggatctccagaagataacgagcagaagcaacttttcgttgagcagcacaagcactacttggatgagatcatcgagcagatctctgagttctctaaaagggtgatcctcgctgatgcaaacctcgataaggtgttgtctgcttacaacaagcacagagataagcctatcagggaacaggcagagaacatcatccatctcttcacccttaccaacctcggtgctcctgctgctttcaagtacttcgatacaaccatcgataggaagagatacacctctaccaaagaagtgctcgatgctaccctcatccatcagtctatcactggactctacgagactaggatcgatctctcacagctcggtggtgattcaagggctgatcctaagaagaagaggaaggtttgaggcgcgccgagctccaggcctcccagctttcgtccgtatcatcggtttcgacaacgttcgtcaagttcaatgcatcagtttcattgcccacacaccagaatcctactaagtttgagtattatggcattggaaaagctgttttcttctatcatttgttctgcttgtaatttactgtgttctttcagtttttgttttcggacatcaaaatgcaaatggatggataagagttaataaatgatatggtccttttgttcattctcaaattattattatctgttgtttttactttaatgggttgaatttaagtaagaaaggaactaacagtgtgatattaaggtgcaatgttagacatataaaacagtctttcacctctctttggttatgtcttgaattggtttgtttcttcacttatctgtgtaatcaagtttactatgagtctatgatcaagtaattatgcaatcaagttaagtacagtataggcttgagctccctaggctttttttcttcttcttcgttcatacagtttttttttgtttatcagcttacattttcttgaaccgtagctttcgttttcttctttttaactttccattcggagtttttgtatcttgtttcatagtttgtcccaggattagaatgattaggcatcgaaccttcaagaatttgattgaataaaacatcttcattcttaagatatgaagataatcttcaaaaggcccctgggaatctgaaagaagagaagcaggcccatttatatgggaaagaacaatagtatttcttatataggcccatttaagttgaaaacaatcttcaaaagtcccacatcgcttagataagaaaacgaagctgagtttatatacagctagagtcgaagtagtgattggaagcaagagacgttctagggttttagagctagaaatagcaagttaaaataaggctagtccgttatcaacttgaaaaagtggcaccgagtcggtgctttttttctagacccagctttcttgtacaaagttggcattacctaggcccgggcctgaggacgcgtccatggttaattaagacgtccggaccgactagtggatcctctagagtcgacctgcaggcatgcaagcttcttcgtcaacatggtggagcacgacacgcttgtctactccaaaaatatcaaagatacagtctcagaagaccaaagggcaattgagacttttcaacaaagggtaatatccggaaacctcctcggattccattgcccagctatctgtcactttattgtgaagatagtggaaaaggaaggtggctcctacaaatgccatcattgcgataaaggaaaggccatcgttgaagatgcctctgccgacagtggtcccaaagatggacccccacccacgaggagcatcgtggaaaaagaagacgttccaaccacgtcttcaaagcaagtggattgatgtgatatctccactgacgtaagggatgacgcacaatcaatcccactatccttcgcaagacccttttaagggggaagttcatttcatttggagaggacacgctgaaatcaccagtctctctgtacaaatcnatctctctctataatattgtgtaagtagttcccagataagggaattagggttcttatagggtttcgctcagctgttgagcatataagaaacccttagtcgatagatctgttggggatctaccatgagcccagaacgacgcccggccgacatccgccgtgccaccgaggcggacatgccggcggtctgcaccatcgtcaaccactacatcgagacaagcacggtcaacttccgtaccgagccgcaggaaccgcaggagtggacggacgacctcgtccgtctgcgggagcgctatccctggctcgtcgccgaggtggacggcgaggtcgccggcatcgcctacgcgggcccctggaaggcacgcaacgcctacgactggacggccgagtcgaccgtgtacgtctccccccgccaccagcggacgggactgggctccacgctctacacccacctgctgaagtccctggaggcacagggcttcaagagcgtggtcgctgtcatcgggctgcccaacgacccgagcgtgcgcatgcacgaggcgctcggatatgccccccgcggcatgctgcgggcggccggcttcaagcacgggaactggcatgacgtgggtttctggcagctggacttcagcctgccggtaccgccccgtccggtcctgcccgtcaccgagatctgatgacccaacttagtatgtatttgtatttgtaaaatacttctatcaataaaatttctaattcctaaaaccaaaatccaggggtaccgaacaagcttggcactggccgtcgttttacaacgtcgtgactgggaaaaccctggcgttacccaacttaatcgccttgcagcacatccccctttcgccagctggcgtaatagcgaagaggcccgcaccgatcgcccttcccaacagttgcgcagcctgaatggcgaatgagcttgagcttggatcagattgtcgtttcccgccttcagtttaaactatcagtgtttgacaggatatattggcgggtaaacctaagagaaaagagcgtttattagaataacggatatttaaaagggcgtgaaaaggtttatccgttcgtccatttgtatgtgcatgccaaccacagggttcccctcgggatcaa

SEQ ID NO: 705 - DNA, 14548 bp, Artificial Sequence
  Description of Artificial Sequence: Synthetic polynucleotide
  modified_base (13426)..(13426): a, c, t, g, unknown or other
agtactttgatccaacccctccgctgctatagtgcagtcggcttctgacgttcagtgcagccgtcttctgaaaacgacatgtcgcacaagtcctaagttacgcgacaggctgccgccctgcccttttcctggcgttttcttgtcgcgtgttttagtcgcataaagtagaatacttgcgactagaaccggagacattacgccatgaacaagagcgccgccgctggcctgctgggctatgcccgcgtcagcaccgacgaccaggacttgaccaaccaacgggccgaactgcacgcggccggctgcaccaagctgttttccgagaagatcaccggcaccaggcgcgaccgcccggagctggccaggatgcttgaccacctacgccctggcgacgttgtgacagtgaccaggctagaccgcctggcccgcagcacccgcgacctactggacattgccgagcgcatccaggaggccggcgcgggcctgcgtagcctggcagagccgtgggccgacaccaccacgccggccggccgcatggtgttgaccgtgttcgccggcattgccgagttcgagcgttccctaatcatcgaccgcacccggagcgggcgcgaggccgccaaggcccgaggcgtgaagtttggcccccgccctaccctcaccccggcacagatcgcgcacgcccgcgagctgatcgaccaggaaggccgcaccgtgaaagaggcggctgcactgcttggcgtgcatcgctcgaccctgtaccgcgcacttgagcgcagcgaggaagtgacgcccaccgaggccaggcggcgcggtgccttccgtgaggacgcattgaccgaggccgacgccctggcggccgccgagaatgaacgccaagaggaacaagcatgaaaccgcaccaggacggccaggacgaaccgtttttcattaccgaagagatcgaggcggagatgatcgcggccgggtacgtgttcgagccgcccgcgcacgtctcaaccgtgcggctgcatgaaatcctggccggtttgtctgatgccaagctggcggcctggccggccagcttggccgctgaagaaaccgagcgccgccgtctaaaaaggtgatgtgtatttgagtaaaacagcttgcgtcatgcggtcgctgcgtatatgatgcgatgagtaaataaacaaatacgcaaggggaacgcatgaaggttatcgctgtacttaaccagaaaggcgggtcaggcaagacgaccatcgcaacccatctagcccgcgccctgcaactcgccggggccgatgttctgttagtcgattccgatccccagggcagtgcccgcgattgggcggccgtgcgggaagatcaaccgctaaccgttgtcggcatcgaccgcccgacgattgaccgcgacgtgaaggccatcggccggcgcgacttcgtagtgatcgacggagcgccccaggcggcggacttggctgtgtccgcgatcaaggcagccgacttcgtgctgattccggtgcagccaagcccttacgacatatgggccaccgccgacctggtggagctggttaagcagcgcattgaggtcacggatggaaggctacaagcggcctttgtcgtgtcgcgggcgatcaaaggcacgcgcatcggcggtgaggttgccgaggcgctggccgggtacgagctgcccattcttgagtcccgtatcacgcagcgcgtgagctacccaggcactgccgccgccggcacaaccgttcttgaatcagaacccgagggcgacgctgcccgcgaggtccaggcgctggccgctgaaattaaatcaaaactcatttgagttaatgaggtaaagagaaaatgagcaaaagcacaaacacgctaagtgccggccgtccgagcgcacgcagcagcaaggctgcaacgttggccagcctggcagacacgccagccatgaagcgggtcaactttcagttgccggcggaggatcacaccaagctgaagatgtacgcggtacgccaaggcaagaccattaccgagctgctatctgaatacatcgcgcagctaccagagtaaatgagcaaatgaataaatgagtagatgaattttagcggctaaaggaggcggcatggaaaatcaagaacaaccaggcaccgacgccgtggaatgccccatgtgtggaggaacgggcggttggccaggcgtaagcggctgggttgtctgccggccctgcaatggcactggaacccccaagcccgaggaatcggcgtgacggtcgcaaaccatccggcccggtacaaatcggcgcggcgctgggtgatgacctggtggagaagttgaaggccgcgcaggccgcccagcggcaacgcatcgaggcagaagcacgccccggtgaatcgtggcaagcggccgctgatcgaatccgcaaagaatcccggcaaccgccggcagccggtgcgccgtcgattaggaagccgcccaagggcgacgagcaaccagattttttcgttccgatgctctatgacgtgggcacccgcgatagtcgcagcatcatggacgtggccgttttccgtctgtcgaagcgtgaccgacgagctggcgaggtgatccgctacgagcttccagacgggcacgtagaggtttccgcagggccggccggcatggccagtgtgtgggattacgacctggtactgatggcggtttcccatctaaccgaatccatgaaccgataccgggaagggaagggagacaagcccggccgcgtgttccgtccacacgttgcggacgtactcaagttctgccggcgagccgatggcggaaagcagaaagacgacctggtagaaacctgcattcggttaaacaccacgcacgttgccatgcagcgtacgaagaaggccaagaacggccgcctggtgacggtatccgagggtgaagccttgattagccgctacaagatcgtaaagagcgaaaccgggcggccggagtacatcgagatcgagctagctgattggatgtaccgcgagatcacagaaggcaagaacccggacgtgctgacggttcaccccgattactttttgatcgatcccggcatcggccgttttctctaccgcctggcacgccgcgccgcaggcaaggcagaagccagatggttgttcaagacgatctacgaacgcagtggcagcgccggagagttcaagaagttctgtttcaccgtgcgcaagctgatcgggtcaaatgacctgccggagtacgatttgaaggaggaggcggggcaggctggcccgatcctagtcatgcgctaccgcaacctgatcgagggcgaagcatccgccggttcctaatgtacggagcagatgctagggcaaattgccctagcaggggaaaaaggtcgaaaaggtctctttcctgtggatagcacgtacattgggaacccaaagccgtacattgggaaccggaacccgtacattgggaacccaaagccgtacattgggaaccggtcacacatgtaagtgactgatataaaagagaaaaaaggcgatttttccgcctaaaactctttaaaacttattaaaactcttaaaacccgcctggcctgtgcataactgtctggccagcgcacagccgaagagctgcaaaaagcgcctacccttcggtcgctgcgctccctacgccccgccgcttcgcgtcggcctatcgcggccgctggccgctcaaaaatggctggcctacggccaggcaatctaccagggcgcggacaagccgcgccgtcgccactcgaccgccggcgcccacatcaaggcaccctgcctcgcgcgtttcggtgatgacggtgaaaacctctgacacatgcagctcccggagacggtcacagcttgtctgtaagcggatgccgggagcagacaagcccgtcagggcgcgtcagcgggtgttggcgggtgtcggggcgcagccatgacccagtcacgtagcgatagcggagtgtatactggcttaactatgcggcatcagagcagattgtactgagagtgcaccatatgcggtgtgaaataccgcacagatgcgtaaggagaaaataccgcatcaggcgctcttccgcttcctcgctcactgactcgctgcgctcggtcgttcggctgcggcgagcggtatcagctcactcaaaggcggtaatacggttatccacagaatcaggggataacgcaggaaagaacatgtgagcaaaaggccagcaaaaggccaggaaccgtaaaaaggccgcgttgctggcgtttttccataggctccgcccccctgacgagcatcacaaaaatcgacgctcaagtcagaggtggcgaaacccgacaggactataaagataccaggcgtttccccctggaagctccctcgtgcgctctcctgttccgaccctgccgcttaccggatacctgtccgcctttctcccttcgggaagcgtggcgctttctcatagctcacgctgtaggtatctcagttcggtgtaggtcgttcgctccaagctgggctgtgtgcacgaaccccccgttcagcccgaccgctgcgccttatccggtaactatcgtcttgagtccaacccggtaagacacgacttatcgccactggcagcagccactggtaacaggattagcagagcgaggtatgtaggcggtgctacagagttcttgaagtggtggcctaactacggctacactagaaggacagtatttggtatctgcgctctgctgaagccagttaccttcggaaaaagagttggtagctcttgatccggcaaacaaaccaccgctggtagcggtggtttttttgtttgcaagcagcagattacgcgcagaaaaaaaggatctcaagaagatcctttgatcttttctacggggtctgacgctcagtggaacgaaaactcacgttaagggattttggtcatgcatgatatatctcccaatttgtgtagggcttattatgcacgcttaaaaataataaaagcagacttgacctgatagtttggctgtgagcaattatgtgcttagtgcatctaatcgcttgagttaacgccggcgaagcggcgtcggcttgaacgaatttctagctagacattatttgccgactaccttggtgatctcgcctttcacgtagtggacaaattcttccaactgatctgcgcgcgaggccaagcgatcttcttcttgtccaagataagcctgtctagcttcaagtatgacgggctgatactgggccggcaggcgctccattgcccagtcggcagcgacatccttcggcgcgattttgccggttactgcgctgtaccaaatgcgggacaacgtaagcactacatttcgctcatcgccagcccagtcgggcggcgagttccatagcgttaaggtttcatttagcgcctcaaatagatcctgttcaggaaccggatcaaagagttcctccgccgctggacctaccaaggcaacgctatgttctcttgcttttgtcagcaagatagccagatcaatgtcgatcgtggctggctcgaagatacctgcaagaatgtcattgcgctgccattctccaaattgcagttcgcgcttagctggataacgccacggaatgatgtcgtcgtgcacaacaatggtgacttctacagcgcggagaatctcgctctctccaggggaagccgaagtttccaaaaggtcgttgatcaaagctcgccgcgttgtttcatcaagccttacggtcaccgtaaccagcaaatcaatatcactgtgtggcttcaggccgccatccactgcggagccgtacaaatgtacggccagcaacgtcggttcgagatggcgctcgatgacgccaactacctctgatagttgagtcgatacttcggcgatcaccgcttcccccatgatgtttaactttgttttagggcgactgccctgctgcgtaacatcgttgctgctccataacatcaaacatcgacccacggcgtaacgcgcttgctgcttggatgcccgaggcatagactgtaccccaaaaaaacatgtcataacaagaagccatgaaaaccgccactgcgccgttaccaccgctgcgttcggtcaaggttctggaccagttgcgtgacggcagttacgctacttgcattacagcttacgaaccgaacgaggcttatgtccactgggttcgtgcccgaattgatcacaggcagcaacgctctgtcatcgttacaatcaacatgctaccctccgcgagatcatccgtgtttcaaacccggcagcttagttgccgttcttccgaatagcatcggtaacatgagcaaagtctgccgccttacaacggctctcccgctgacgccgtcccggactgatgggctgcctgtatcgagtggtgattttgtgccgagctgccggtcggggagctgttggctggctggtggcaggatatattgtggtgtaaacaaattgacgcttagacaacttaataacacattgcggacgtttttaatgtactgaattaacgccgaattgctctagccaatacgcaaaccgcctctccccgcgcgttggccgattcattaatgcagctggcacgacaggtttcccgactggaaagcgggcagtgagcgcaacgcaattaatgtgagttagctcactcattaggcaccccaggctttacactttatgcttccggctcgtatgttgtgtggaattgtgagcggataacaatttcacacaggaaacagctatgacatgattacgaattcaaaaattacggatatgaatataggcatatccgtatccgaattatccgtttgacagctagcaacgattgtacaattgcttctttaaaaaaggaagaaagaaagaaagaaaagaatcaacatcagcgttaacaaacggccccgttacggcccaaacggtcatatagagtaacggcgttaagcgttgaaagactcctatcgaaatacgtaaccgcaaacgtgtcatagtcagatcccctcttccttcaccgcctcaaacacaaaaataatcttctacagcctatatatacaacccccccttctatctctcctttctcacaattcatcatctttctttctctacccccaattttaagaaatcctctcttctcctcttcattttcaaggtaaatctctctctctctctctctctctgttattccttgttttaattaggtatgtattattgctagtttgttaatctgcttatcttatgtatgccttatgtgaatatctttatcttgttcatctcatccgtttagaagctataaatttgttgatttgactgtgtatctacacgtggttatgtttatatctaatcagatatgaatttcttcatattgttgcgtttgtgtgtaccaatccgaaatcgttgatttttttcatttaatcgtgtagctaattgtacgtatacatatggatctacgtatcaattgttcatctgtttgtgtttgtatgtatacagatctgaaaacatcacttctctcatctgattgtgttgttacatacatagatatagatctgttatatcattttttttattaattgtgtatatatatatgtgcatagatctggattacatgattgtgattatttacatgattttgttatttacgtatgtatatatgtagatctggactttttggagttgttgacttgattgtatttgtgtgtgtatatgtgtgttctgatcttgatatgttatgtatgtgcagcgaattcggcgcgccatggataagaagtactctatcggactcgatatcggaactaactctgtgggatgggctgtgatcaccgatgagtacaaggtgccatctaagaagttcaaggttctcggaaacaccgataggcactctatcaagaaaaaccttatcggtgctctcctcttcgattctggtgaaactgctgaggctaccagactcaagagaaccgctagaagaaggtacaccagaagaaagaacaggatctgctacctccaagagatcttctctaacgagatggctaaagtggatgattcattcttccacaggctcgaagagtcattcctcgtggaagaagataagaagcacgagaggcaccctatcttcggaaacatcgttgatgaggtggcataccacgagaagtaccctactatctaccacctcagaaagaagctcgttgattctactgataaggctgatctcaggctcatctacctcgctctcgctcacatgatcaagttcagaggacacttcctcatcgagggtgatctcaaccctgataactctgatgtggataagttgttcatccagctcgtgcagacctacaaccagcttttcgaagagaaccctatcaacgcttcaggtgtggatgctaaggctatcctctctgctaggctctctaagtcaagaaggcttgagaacctcattgctcagctccctggtgagaagaagaacggacttttcggaaacttgatcgctctctctctcggactcacccctaacttcaagtctaacttcgatctcgctgaggatgcaaagctccagctctcaaaggatacctacgatgatgatctcgataacctcctcgctcagatcggagatcagtacgctgatttgttcctcgctgctaagaacctctctgatgctatcctcctcagtgatatcctcagagtgaacaccgagatcaccaaggctccactctcagcttctatgatcaagagatacgatgagcaccaccaggatctcacacttctcaaggctcttgttagacagcagctcccagagaagtacaaagagattttcttcgatcagtctaagaacggatacgctggttacatcgatggtggtgcatctcaagaagagttctacaagttcatcaagcctatcctcgagaagatggatggaaccgaggaactcctcgtgaagctcaatagagaggatcttctcagaaagcagaggaccttcgataacggatctatccctcatcagatccacctcggagagttgcacgctatccttagaaggcaagaggatttctacccattcctcaaggataacagggaaaagattgagaagattctcaccttcagaatcccttactacgtgggacctctcgctagaggaaactcaagattcgcttggatgaccagaaagtctgaggaaaccatcaccccttggaacttcgaagaggtggtggataagggtgctagtgctcagtctttcatcgagaggatgaccaacttcgataagaaccttccaaacgagaaggtgctccctaagcactctttgctctacgagtacttcaccgtgtacaacgagttgaccaaggttaagtacgtgaccgagggaatgaggaagcctgcttttttgtcaggtgagcaaaagaaggctatcgttgatctcttgttcaagaccaacagaaaggtgaccgtgaagcagctcaaagaggattacttcaagaaaatcgagtgcttcgattcagttgagatttctggtgttgaggataggttcaacgcatctctcggaacctaccacgatctcctcaagatcattaaggataaggatttcttggataacgaggaaaacgaggatatcttggaggatatcgttcttaccctcaccctctttgaagatagagagatgattgaagaaaggctcaagacctacgctcatctcttcgatgataaggtgatgaagcagttgaagagaagaagatacactggttggggaaggctctcaagaaagctcattaacggaatcagggataagcagtctggaaagacaatccttgatttcctcaagtctgatggattcgctaacagaaacttcatgcagctcatccacgatgattctctcacctttaaagaggatatccagaaggctcaggtttcaggacagggtgatagtctccatgagcatatcgctaacctcgctggatctcctgcaatcaagaagggaatcctccagactgtgaaggttgtggatgagttggtgaaggtgatgggaaggcataagcctgagaacatcgtgatcgaaatggctagagagaaccagaccactcagaagggacagaagaactctagggaaaggatgaagaggatcgaggaaggtatcaaagagcttggatctcagatcctcaaagagcaccctgttgagaacactcagctccagaatgagaagctctacctctactacctccagaacggaagggatatgtatgtggatcaagagttggatatcaacaggctctctgattacgatgttgatcatatcgtgccacagtcattcttgaaggatgattctatcgataacaaggtgctcaccaggtctgataagaacaggggtaagagtgataacgtgccaagtgaagaggttgtgaagaaaatgaagaactattggaggcagctcctcaacgctaagctcatcactcagagaaagttcgataacttgactaaggctgagaggggaggactctctgaattggataaggcaggattcatcaagaggcagcttgtggaaaccaggcagatcactaagcacgttgcacagatcctcgattctaggatgaacaccaagtacgatgagaacgataagttgatcagggaagtgaaggttatcaccctcaagtcaaagctcgtgtctgatttcagaaaggatttccaattctacaaggtgagggaaatcaacaactaccaccacgctcacgatgcttaccttaacgctgttgttggaaccgctctcatcaagaagtatcctaagctcgagtcagagttcgtgtacggtgattacaaggtgtacgatgtgaggaagatgatcgctaagtctgagcaagagatcggaaaggctaccgctaagtatttcttctactctaacatcatgaatttcttcaagaccgagattaccctcgctaacggtgagatcagaaagaggccactcatcgagacaaacggtgaaacaggtgagatcgtgtgggataagggaagggatttcgctaccgttagaaaggtgctctctatgccacaggtgaacatcgttaagaaaaccgaggtgcagaccggtggattctctaaagagtctatcctccctaagaggaactctgataagctcattgctaggaagaaggattgggaccctaagaaatacggtggtttcgattctcctaccgtggcttactctgttctcgttgtggctaaggttgagaagggaaagagtaagaagctcaagtctgttaaggaacttctcggaatcactatcatggaaaggtcatctttcgagaagaacccaatcgatttcctcgaggctaagggatacaaagaggttaagaaggatctcatcatcaagctcccaaagtactcactcttcgaactcgagaacggtagaaagaggatgctcgcttctgctggtgagcttcaaaagggaaacgagcttgctctcccatctaagtacgttaactttctttacctcgcttctcactacgagaagttgaagggatctccagaagataacgagcagaagcaacttttcgttgagcagcacaagcactacttggatgagatcatcgagcagatctctgagttctctaaaagggtgatcctcgctgatgcaaacctcgataaggtgttgtctgcttacaacaagcacagagataagcctatcagggaacaggcagagaacatcatccatctcttcacccttaccaacctcggtgctcctgctgctttcaagtacttcgatacaaccatcgataggaagagatacacctctaccaaagaagtgctcgatgctaccctcatccatcagtctatcactggactctacgagactaggatcgatctctcacagctcggtggtgattcaagggctgatcctaagaagaagaggaaggtttgaggcgcgccgagctccaggcctcccagctttcgtccgtatcatcggtttcgacaacgttcgtcaagttcaatgcatcagtttcattgcccacacaccagaatcctactaagtttgagtattatggcattggaaaagctgttttcttctatcatttgttctgcttgtaatttactgtgttctttcagtttttgttttcggacatcaaaatgcaaatggatggataagagttaataaatgatatggtccttttgttcattctcaaattattattatctgttgtttttactttaatgggttgaatttaagtaagaaaggaactaacagtgtgatattaaggtgcaatgttagacatataaaacagtctttcacctctctttggttatgtcttgaattggtttgtttcttcacttatctgtgtaatcaagtttactatgagtctatgatcaagtaattatgcaatcaagttaagtacagtataggcttgagctccctaggctttttttcttcttcttcgttcatacagtttttttttgtttatcagcttacattttcttgaaccgtagctttcgttttcttctttttaactttccattcggagtttttgtatcttgtttcatagtttgtcccaggattagaatgattaggcatcgaaccttcaagaatttgattgaataaaacatcttcattcttaagatatgaagataatcttcaaaaggcccctgggaatctgaaagaagagaagcaggcccatttatatgggaaagaacaatagtatttcttatataggcccatttaagttgaaaacaatcttcaaaagtcccacatcgcttagataagaaaacgaagctgagtttatatacagctagagtcgaagtagtgattggccgttaatttgagagtccagttttagagctagaaatagcaagttaaaataaggctagtccgttatcaacttgaaaaagtggcaccgagtcggtgctttttttctagacccagctttcttgtacaaagttggcattacctaggcccgggcctgaggacgcgtccatggttaattaagacgtccggaccgactagtggatcctctagagtcgacctgcaggcatgcaagcttcttcgtcaacatggtggagcacgacacgcttgtctactccaaaaatatcaaagatacagtctcagaagaccaaagggcaattgagacttttcaacaaagggtaatatccggaaacctcctcggattccattgcccagctatctgtcactttattgtgaagatagtggaaaaggaaggtggctcctacaaatgccatcattgcgataaaggaaaggccatcgttgaagatgcctctgccgacagtggtcccaaagatggacccccacccacgaggagcatcgtggaaaaagaagacgttccaaccacgtcttcaaagcaagtggattgatgtgatatctccactgacgtaagggatgacgcacaatcaatcccactatccttcgcaagacccttttaagggggaagttcatttcatttggagaggacacgctgaaatcaccagtctctctgtacaaatcnatctctctctataatattgtgtaagtagttcccagataagggaattagggttcttatagggtttcgctcagctgttgagcatataagaaacccttagtcgatagatctgttggggatctaccatgagcccagaacgacgcccggccgacatccgccgtgccaccgaggcggacatgccggcggtctgcaccatcgtcaaccactacatcgagacaagcacggtcaacttccgtaccgagccgcaggaaccgcaggagtggacggacgacctcgtccgtctgcgggagcgctatccctggctcgtcgccgaggtggacggcgaggtcgccggcatcgcctacgcgggcccctggaaggcacgcaacgcctacgactggacggccgagtcgaccgtgtacgtctccccccgccaccagcggacgggactgggctccacgctctacacccacctgctgaagtccctggaggcacagggcttcaagagcgtggtcgctgtcatcgggctgcccaacgacccgagcgtgcgcatgcacgaggcgctcggatatgccccccgcggcatgctgcgggcggccggcttcaagcacgggaactggcatgacgtgggtttctggcagctggacttcagcctgccggtaccgccccgtccggtcctgcccgtcaccgagatctgatgacccaacttagtatgtatttgtatttgtaaaatacttctatcaataaaatttctaattcctaaaaccaaaatccaggggtaccgaacaagcttggcactggccgtcgttttacaacgtcgtgactgggaaaaccctggcgttacccaacttaatcgccttgcagcacatccccctttcgccagctggcgtaatagcgaagaggcccgcaccgatcgcccttcccaacagttgcgcagcctgaatggcgaatgagcttgagcttggatcagattgtcgtttcccgccttcagtttaaactatcagtgtttgacaggatatattggcgggtaaacctaagagaaaagagcgtttattagaataacggatatttaaaagggcgtgaaaaggtttatccgttcgtccatttgtatgtgcatgccaaccacagggttcccctcgggatcaa

SEQ ID NO: 706 - DNA, 20 bp, Artificial Sequence
  Description of Artificial Sequence: Synthetic oligonucleotide
gccgttaatttgagagtcca

SEQ ID NO: 707 - DNA, 96 bp, Artificial Sequence
  Description of Artificial Sequence: Synthetic oligonucleotide
gccgttaatttgagagtccagttttagagctagaaatagcaagttaaaataaggctagtccgttatcaacttgaaaaagtggcaccgagtcggtgc

SEQ ID NO: 708 - DNA, 476 bp, Glycine max
cacgtggccccacacacattttttttccctcaacagttaaactctcttcctccatctttcttggtaggtggcacttctcggagcatagtaaaactaaccccacatttttctttttcattttcattttcattatattataaacctatatatatacccaattggttattggtgtctggtgtcccttcaacctttaaaacaaacaaatccattttctttttcttttttttttcattttattttttccattattttatcaacacaattaattccatgtgtatcctttggtcctttctgtcccacagcacatatatatagtctcgctttacatactcattccatggccagtacacacaccacacctcattatatctttctttcaattcctatcctcttccttgtagtgtacccattttgaatgtgttctctctctctctctctttctttaggtccctggtgaatatctagaaccactctct

SEQ ID NO: 709 - DNA, 92 bp, Artificial Sequence; identical to SEQ ID NO: 201
  Description of Artificial Sequence: Synthetic oligonucleotide

SEQ ID NO: 710 - RNA, 36 nt, Artificial Sequence
  Description of Artificial Sequence: Synthetic oligonucleotide
aaaugaaaaagaaaaaugugguuuuagagcuaugcu

SEQ ID NO: 711 - RNA, 36 nt, Artificial Sequence
  Description of Artificial Sequence: Synthetic oligonucleotide
aaaggaccaaaggauacacaguuuuagagcuaugcu

SEQ ID NO: 712 - RNA, 36 nt, Artificial Sequence
  Description of Artificial Sequence: Synthetic oligonucleotide
aagaaagauauaaugaggugguuuuagagcuaugcu

SEQ ID NO: 713 - DNA, 473 bp, Glycine max
atggcaagaatgcctttagagcctctaatagtggggagagtcataggagaagttcttgattcttttaccacaagcacaaaaatgattgtgagttacaacaagaatcaagtctacaatggccatgaactcttcccttccactgtcaacaccaagcccaaggttgagattgagggtggtgatatgaggtccttctttacactggtactatatatatatcttttatctcctctcttattccttttctctttaaagaacaaagttttttgggaaaaaaaagagaggaaaaacttgagctgttgccagtgtgtatctttgttgtttcctgtaattcagctcacacagtaagtctcttttggagttttctttaccaatactgaatcattaagctaatgtctcgcttttttggtgcagatcatgactgaccctgatgttcctggccctagtgacccttatctgagagagcacttgcactg

SEQ ID NO: 714 - RNA, 36 nt, Artificial Sequence
  Description of Artificial Sequence: Synthetic oligonucleotide
cuugggcuugguguugacagguuuuagagcuaugcu

SEQ ID NO: 715 - RNA, 36 nt, Artificial Sequence
  Description of Artificial Sequence: Synthetic oligonucleotide
cacuagggccaggaacaucaguuuuagagcuaugcu

SEQ ID NO: 716 - DNA, 500 bp, Glycine max
aattaattgacaaaaaatggtttctgtttcatatagaaactatgtttttgttgtgtagtcatacattacggaatctagtttccattaaataagtaacgtgaaaaaaaataaaaggtgaaatatatattgttggaaaagaagctatgaggtgcaagaaccgatcacatggagaaggcaatgaaagacaaggaggagcaatggaagagagaaaatgagaagatggaagggatgtgaaaatgtttgaaaaaaacgaggtgatcagttttaaaatacgaatttagtattttctttttaagaaaattctttcggaaagtcgtgttttaaaacatgacttttatttatttgaagtcgtgttctaaaacatgactttatttcatatcctttaatattttatatccttaatatttttaaaatttatccatttgtaatattttttaaaaattgacccatatatgtaaaatacccgtcaagatctctttattattttgaaagcgaaagca

SEQ ID NO: 717 - RNA, 36 nt, Artificial Sequence
  Description of Artificial Sequence: Synthetic oligonucleotide
uuguuggaaaagaagcuaugguuuuagagcuaugcu

SEQ ID NO: 718 - RNA, 36 nt, Artificial Sequence
  Description of Artificial Sequence: Synthetic oligonucleotide
gaaaauguuugaaaaaaacgguuuuagagcuaugcu

SEQ ID NO: 719 - RNA, 36 nt, Artificial Sequence
  Description of Artificial Sequence: Synthetic oligonucleotide
aaauaauaaagagaucuugaguuuuagagcuaugcu

SEQ ID NO: 720 - DNA, 500 bp, Glycine max
cgtacattttttttcttacatgctgaaatggaagaaattaaagaacataaagtataaagtatggtcatgaaaattgtaagaggaatttccgggtaaaagtccaaaaccgaaagaaaaaataggtcaagccataacatgtatatgctgtcccaccacagtttagtctctgcagactttttgtcaagccgcgtgggtcccacttctggcggacccaccacactaatgtcgtaataatgtggagagtcgcaattacaagtccattttctttcaagatttcttagagacttttgtgccccctaggcctccacgaccaagtcataacccaaactcaaatatttaataaaaataaatccatcaattagcatagttatgaaaccaaccattccttataaataccctcacaacacatattcattttatatcaactaactttgtgcttcctccgcagaaaaataaaaaaagagtagctagcactagctagctaaacacagtacgagtag

SEQ ID NO: 721 - RNA, 36 nt, Artificial Sequence
  Description of Artificial Sequence: Synthetic oligonucleotide
agucugcagagacuaaacugguuuuagagcuaugcu

SEQ ID NO: 722 - RNA, 36 nt, Artificial Sequence
  Description of Artificial Sequence: Synthetic oligonucleotide
acuuggucguggaggccuagguuuuagagcuaugcu

SEQ ID NO: 723 - RNA, 36 nt, Artificial Sequence
  Description of Artificial Sequence: Synthetic oligonucleotide
uaaaaugaauauguguugugguuuuagagcuaugcu

SEQ ID NO: 724 - DNA, 288 bp, Glycine max
gaaagagcagagagaatgggcacagatccttcaaaaggagtcccaaaccccaactgggcgtggcaaacacatggccaggttactgacaccccagtaccaccgttctctactgcagcatcatcaggattctcaatttcagccacttttccatcaactgccatctttccaacaaaatccatcaactcagttccccatagcctctgtttcacttcacccagcacaccaggtagcaacgcacctcaattctataactattacgaggtgaagtccccgcagccaccgtcctag

SEQ ID NO: 725 - RNA, 36 nt, Artificial Sequence
  Description of Artificial Sequence: Synthetic oligonucleotide
gaugcugcaguagagaacggguuuuagagcuaugcu

SEQ ID NO: 726 - DNA, 221 bp, Glycine max
gagaatgggcacagatccttcaaaaggagtcccaaaccccaactgggcgtggcaaacacatggccaggttactgacaccccagtaccaccgttctctactgctgcctcttccggtttttccatttcagccacttttccatcaactgccatctttccaacaaaatccatcaactcagttccccatagcctctgtttcacttcacccagcacaccaggtagca

SEQ ID NO: 727 - DNA, 344 bp, Glycine max
tgatggttcaagtagtttgtctagttcctgtactttcttggagtatgtcatgtaacgagctgttgtatttataatttttgttttggtttttgaccttgttacatacagcacattggtatgtagatatatctggcatatcaaaactggtcaaaatgtaacattattttatggtatcatgttgtttccatacataagtgttcgttttacacagtagtaattgctttacccgaaagagtaggtgctctgcttcctctgtgcatgggaggaggttttatattgcttgcctagaagactagtgattgtcatacacattagctgttattctaattgattgtttcatgtca

SEQ ID NO: 728 - RNA, 36 nt, Artificial Sequence
  Description of Artificial Sequence: Synthetic oligonucleotide
gacauacuccaagaaaguacguuuuagagcuaugcu

SEQ ID NO: 729 - RNA, 36 nt, Artificial Sequence
  Description of Artificial Sequence: Synthetic oligonucleotide
ccuuguuacauacagcacauguuuuagagcuaugcu

SEQ ID NO: 730 - RNA, 36 nt, Artificial Sequence
  Description of Artificial Sequence: Synthetic oligonucleotide
aaaccuccucccaugcacagguuuuagagcuaugcu

SEQ ID NO: 731 - DNA, 216 bp, Glycine max
aactattcttccataatcaccgtccatccagaggtcatcgatgggagacccggtacaatggtgatcgaatcatttgtggtggatgtgcctgatgggaacaccagggatgaaacttgttactttgtggaggctttgatcaggtgtaacctaagctctttagctgatgtctcagagaggatggccgtgcaaggtcgaaccaatcctatcaaccattaa

SEQ ID NO: 732 - protein, 71 aa, Glycine max
NYSSIITVHPEVIDGRPGTMVIESFVVDVPDGNTRDETCYFVEALIRCNLSSLADVSERMAVQGRTNPINH

SEQ ID NO: 733 - RNA, 36 nt, Artificial Sequence
  Description of Artificial Sequence: Synthetic oligonucleotide
ggugaucgaaucauuuguggguuuuagagcuaugcu

SEQ ID NO: 734 - DNA, 202 bp, Glycine max
ggtttaatactcaatcatgttgtggaatttgcagaactattcttccataatcaccgtccatccagaggtcatcgatgggagacccggtacaatggtgatcctatcatttgtggtggatgtgcctgatgggaacaccagggatgaaacttgttactttgtggaggctttgatcaggtgtaacctaagctctttagctgatgtc

SEQ ID NO: 735 - DNA, 539 bp, Glycine max
aaattctaaaaataaaaaaaataatttataaggataaaaaaattaaatcataaaaatcaaaaagatatttcaaccttaacgttaaatacatatgtaataatacagttagaattacaaataaggtgactgcagtagaatatatgtgtaatgacgatggatgggcatccatgtccatgataaagatggatggacatgaacatacatacatatgtgtaagagtagcatgacgtgacacggggtaggactcaggaggtgagaggaaaatatcattgccacgtattcaatcaatctaggcttctcagagctgctaaagatcttctctttctttctctctcccagttgtgttctcttctctagtttgtttctgcagttttgcctctctctctctctctctcactatctatctatcccaccataaccattaaccaccacctcttaaatatttttccacaaatcaccaaaatttcccatttttttcaccctctgaatcacaatttttttctttctaactaaaatcgcctctacacacaaggattcag

SEQ ID NO: 736 - RNA, 36 nt, Artificial Sequence
  Description of Artificial Sequence: Synthetic oligonucleotide
gaguagcaugacgugacacgguuuuagagcuaugcu

SEQ ID NO: 737 - RNA, 36 nt, Artificial Sequence
  Description of Artificial Sequence: Synthetic oligonucleotide
gccuagauugauugaauacgguuuuagagcuaugcu

SEQ ID NO: 738 - RNA, 36 nt, Artificial Sequence
  Description of Artificial Sequence: Synthetic oligonucleotide
cuagagaagagaacacaacuguuuuagagcuaugcu

SEQ ID NO: 739 - DNA, 546 bp, Glycine max
aatttaatctaatggtagataatgtgttcaaaggaacgcttgataacatttctcgtgataaatacgtatttatgagactatttagttatgatcatccatgtcaattaatttccaacccaaagtaatgatcatgtgccaagttgccacccataatttatctcaaaattaatgaaacccaaataaaggcgttgaataataccaccatacaaaagtgtgttatttagcagcatatgtaactaggcatatatctatctgtatatatgagagttgattatgtgtcacatatgaacctttgagacataccatgggttctttttggcatacgcggcgaaatggattacgtcaaatacagcttttgtttaatgcttaaagctttggcagccgatggaaatttcattggcattgtcaacgccttcccctactataagtacaatcacactccttgtctctccctcacaacactaggccttcaatttggttttgtttcatcagttttccagatacagcacattgattgttaaggcgaaatggctgatattgagggtt

SEQ ID NO: 740 - DNA, 43 bp, Artificial Sequence; identical to SEQ ID NO: 186
  Description of Artificial Sequence: Synthetic oligonucleotide

SEQ ID NO: 741 - RNA, 36 nt, Artificial Sequence
  Description of Artificial Sequence: Synthetic oligonucleotide
aguguugugagggagagacaguuuuagagcuaugcu

SEQ ID NO: 742 - RNA, 36 nt, Artificial Sequence
  Description of Artificial Sequence: Synthetic oligonucleotide
gaaccuuugagacauaccauguuuuagagcuaugcu

SEQ ID NO: 743 - RNA, 36 nt, Artificial Sequence
  Description of Artificial Sequence: Synthetic oligonucleotide
ggguuggaaauuaauugacaguuuuagagcuaugcu

SEQ ID NO: 744 - DNA, 474 bp, Glycine max
ttgtttactcctagttattatcttaaaaaaattgaatcatataattatatattaagttttgaatatgtgtttccatcttatagtttatgagattaccatgtgtttaacagattgggatctacaaactttaaaagtaagcagtagatacataatagttttataggcctggttggttagctgaaatttacagctactacgcggataatgaaccccaatgatgaaaacatgcagacgcatgttgcagcatggaagtattttatttaataagaataataataaggtaagtggtagtaattaaattccatattcagtatcatgggaaatgagattctttgcctttgggatacaccattaggcttttagccgttccactgtgtatatgcggcgaaatgcattactccatggcccttgggaatccacttgcctcctatcagactcttacgtagtcaacgccttcgcctactataaaaacac

SEQ ID NO: 745 - RNA, 36 nt, Artificial Sequence
  Description of Artificial Sequence: Synthetic oligonucleotide
auuucgccgcauauacacagguuuuagagcuaugcu

SEQ ID NO: 746 - RNA, 36 nt, Artificial Sequence
  Description of Artificial Sequence: Synthetic oligonucleotide
ugaaauuuacagcuacuacgguuuuagagcuaugcu

SEQ ID NO: 747 - RNA, 36 nt, Artificial Sequence
  Description of Artificial Sequence: Synthetic oligonucleotide
aucccaaucuguuaaacacaguuuuagagcuaugcu

SEQ ID NO: 748 - DNA, 434 bp, Glycine max
caaaaattaattcttttagtaatgatagaatctaatatcttaattcaatgattaattataacttaagtcttcctttaaaataaatctcatctcatctccttcttccttttttgagagagaatctcatctcattcttcggtgatcaaatctagtgccagtaccgtacttggtacgctaccttcacttgcctatgtgcttatcagctatcacctacctttcataatttaatataaaaaataaataaacaatgtcgctgcaaagcatgttcatgttcattaattcatttttattattaaaaaaaaaacacccctttattaggcggcggaaaaactcacggtatctttccaccactttctttatctttagagatcttcttttatatatatatatatatatagatagatagatagatagatacagagatgaaaaatact

SEQ ID NO: 749 - DNA, 12 bp, Artificial Sequence
  Description of Artificial Sequence: Synthetic oligonucleotide
gtaagcgcttac

SEQ ID NO: 750 - RNA, 36 nt, Artificial Sequence
  Description of Artificial Sequence: Synthetic oligonucleotide
gugauagcugauaagcacauguuuuagagcuaugcu

SEQ ID NO: 751 - RNA, 36 nt, Artificial Sequence
  Description of Artificial Sequence: Synthetic oligonucleotide
uuaggcggcggaaaaacucaguuuuagagcuaugcu

SEQ ID NO: 752 - RNA, 36 nt, Artificial Sequence
  Description of Artificial Sequence: Synthetic oligonucleotide
ucucucucaaaaaaggaagaguuuuagagcuaugcu

SEQ ID NO: 753 - DNA, 514 bp, Glycine max
aaagaagctatgaggtgcaagaaccgatcacatggagaaggcaatgaaagacaaggaggagcaatggaagagagaaaatgagaagatggaagggatgtgaaaatgtttgaaaaaaacgaggtgatcagttttaaaatacgaatttagtattttctttttaagaaaattctttcggaaagtcgtgttttaaaacatgacttttatttatttgaagtcgtgttctaaaacatgactttatttcatatcctttaatattttatatccttaatatttttaaaatttatccatttgtaatattttttaaaaattgacccatatatgtaaaatacccgtcaagatctctttattattttgaaagcgaaagcatatcacttcaaacacaatggaatcgaggctattgactaagtataaatagagaagacttcatatcggggttcataattcataacaaagcaaacgagtatataagaaagcataagccaaattttgagtaaactagtgtgcacactatccc

SEQ ID NO: 754 - RNA, 36 nt, Artificial Sequence
  Description of Artificial Sequence: Synthetic oligonucleotide
gcuccucacuagcuaccaagguuuuagagcuaugcu

SEQ ID NO: 755 - RNA, 36 nt, Artificial Sequence; identical to SEQ ID NO: 718
  Description of Artificial Sequence: Synthetic oligonucleotide

SEQ ID NO: 756 - RNA, 36 nt, Artificial Sequence
  Description of Artificial Sequence: Synthetic oligonucleotide
auagagaagacuucauaucgguuuuagagcuaugcu

SEQ ID NO: 757 - RNA, 36 nt, Artificial Sequence
  Description of Artificial Sequence: Synthetic oligonucleotide
aauaauaaagagaucuugacguuuuagagcuaugcu

SEQ ID NO: 758 - DNA, 269 bp, Glycine max
atcggatttcattgggatccatataattgcgttttcaatttctgtgtccttaaacaagctatgccagagaattaatttaattttaagtgttagctttattattttactttcaaatcattgaggaaaacaatggcctatatattattcctatatgtaacatacaataatgttattgcaatagcgtgtacttcaacctaattatttaataccaagtttctatattaatgttgtatcttatgaaatccttctattttccattctataaatta

SEQ ID NO: 759 - DNA, 92 bp, Glycine max; identical to SEQ ID NO: 202

SEQ ID NO: 760 - RNA, 36 nt, Artificial Sequence
  Description of Artificial Sequence: Synthetic oligonucleotide
auuuuacuuucaaaucauugguuuuagagcuaugcu

SEQ ID NO: 761 - RNA, 36 nt, Artificial Sequence
  Description of Artificial Sequence: Synthetic oligonucleotide
cauuauuguauguuacauauguuuuagagcuaugcu

SEQ ID NO: 762 - DNA, 1045 bp, Glycine max
tattcaaaccatagactagtcttttcttaaacatatcatagccgttgctatgtcaagggtgcttcggctggtttgaaacagagttgccaccaattgcaatgaattgagaaaagatagcctgcctagtaatccctttcacattccattttactcttttttttccttccaagtaaccaacaacacaaaactgttctatgaatccaaacgtgccagttatccaagccatgtgggaaactctaagtgtagggtgtatcataagtggtagttgccttattgttcctacatagctgtgatgtaagagtctctttgaggatgctatgccacccttccccaactagctttgattggtcttgtggggtcttcaaaagccttaaccaaaaagggatagtaacattcaaaatggttaatgtttaatgcaccattttaccaacttaaaaatcgtgaccatattatgatgtaacaagtttaattttcctaagtcctatataagttcaacccttggctcaatctttcaacaattcagttgcttactaatactaatctcttaattctctttggccatttctttagtaacattaagataatgtattctgtggaaatggcaccttatggtagattcattgctaacattttgatagctgtgatgtttgtttgcttgttttttgtgaccaacattgtggcacaggattcagagattgctcctacaggtcaattggaggctggaactgggtttgatttgcctgtttctaaggtgatgatgtgttcttcagtgttggcatctcttttggcattcatgttgcagtgaattggaagacagtgggtttcaaatttgaacttgttggggataatcttactttgtatgtgggttaaaattcatatgtttatatatatactatatactatatgtttggttgttgaaaatggtactgtatttttgggcattttgtaagattagctttatgaggagctacagttacaagtatgtaatttctactcagctattattggtgtgagctgatatattaatataattgttaagttcctt

SEQ ID NO: 763 - protein, 73 aa, Glycine max
MYSVEMAPYGRFIANILIAVMFVCLFFVTNIVAQDSEIAPTGQLEAGTGFDLPVSKVMMCSSVLASLLAFMLQ

SEQ ID NO: 764 - DNA, 583 bp, Glycine max
tattcaaaccatagactagtcttttcttaaacatatcatagccgttgctatgtcaagggtgcttcggctggtttgaaacagagttgccaccaattgcaatgaattgagaaaagatagcctgcctagtaatccctttcacattccattttactcttttttttccttccaagtaaccaacaacacaaaactgttctatgaatccaaacgtgccagttatccaagccatgtgggaaactctaagtgtagggtgtatcataagtggtagttgccttattgttcctacatagctgtgatgtaagagtctctttgaggatgctatgccacccttccccaactagctttgattggtcttgtggggtcttcaaaagccttaaccaaaaagggatagtaacattcaaaatggttaatgtttaatgcaccattttaccaacttaaaaatcgtgaccatattatgatgtaacaagtttaattttcctaagtcctatataagttcaacccttggctcaatctttcaacaattcagttgcttactaatactaatctcttaattctctttggccatttctttagtaacattaagata

SEQ ID NO: 765 - DNA, 222 bp, Glycine max
atgtattctgtggaaatggcaccttatggtagattcattgctaacattttgatagctgtgatgtttgtttgcttgttttttgtgaccaacattgtggcacaggattcagagattgctcctacaggtcaattggaggctggaactgggtttgatttgcctgtttctaaggtgatgatgtgttcttcagtgttggcatctcttttggcattcatgttgcagtga

SEQ ID NO: 766 - DNA, 240 bp, Glycine max
attggaagacagtgggtttcaaatttgaacttgttggggataatcttactttgtatgtgggttaaaattcatatgtttatatatatactatatactatatgtttggttgttgaaaatggtactgtatttttgggcattttgtaagattagctttatgaggagctacagttacaagtatgtaatttctactcagctattattggtgtgagctgatatattaatataattgttaagttcctt

SEQ ID NO: 767 - DNA, 581 bp, Artificial
  synthetic
tattcaaaccatagactagtcttttcttaaacatatcatagccgttgctatgtcaagggtgcttcggctggtttgaaacagagttgccaccaattgcaatgaattgagaaaagatagcctgcctagtaagcgcttacgtaagcgcttactcttttttttccttccaagtaaccaacaacacaaaactgttctatgaatccaaacgtgccagttatccaagccatgtgggaaactctaagtgtagggtgtatcataagtggtagttgccttattgttcctacatagctgtgatgtaagcgcttacttgaggatgctatgccacccttccccaactagctttgattggtcttgtggggtcttcaaaagccttaaccaaaaagggatagtaacattcaaaatggttaatgtttaatgcaccattttaccaacttaaaaatcgtgaccatattatgatgtaacaagtttaattttcctaagtcctatataagttcaacccttggctcaatctttcaacaatgtaagcgcttactaatactaatctcttaattctctttggccatttctttagtaacattaagata

SEQ ID NO: 768 - DNA, 593 bp, Artificial
  synthetic
tattcaaaccatagactagtcttttcttaaacatatcatagccgttgctatgtcaagggtgcttcggctggtttgaaacagagttgccaccaattgcaatgaattgagaaaagatagcctgcctagtaagcgcttacgtaagcgcttacgtaagcgcttactcttttttttccttccaagtaaccaacaacacaaaactgttctatgaatccaaacgtgccagttatccaagccatgtgggaaactctaagtgtagggtgtatcataagtggtagttgccttattgttcctacatagctgtgatgtaagcgcttacttgaggatgctatgccacccttccccaactagctttgattggtcttgtggggtcttcaaaagccttaaccaaaaagggatagtaacattcaaaatggttaatgtttaatgcaccattttaccaacttaaaaatcgtgaccatattatgatgtaacaagtttaattttcctaagtcctatataagttcaacccttggctcaatctttcaacaatgtaagcgcttactaatactaatctcttaattctctttggccatttctttagtaacattaagata

SEQ ID NO: 769 - DNA, 1564 bp, Glycine max
caaaatggtccaaattaaatattgtcattcttatatttcttgttacatctctaaagagctaagctacatttataactcacaatcaacgaaataaataattaaaaaaatgacttaagtatgtttgtagtccttaaagttttggaccgggagtaaatctattttggattcttaaattgaaaaaataaaaaatattttaatcctcaaatttcaaaaaatatgtttttagtcgttggatgccaacaacctcgacaaaagtgatccattttcaaataccaaagtcatcacttccgttaacacagtctagctccatggattaaaattgtacttttaaaatgagactgaaatgattttattttattttctaaatttggagagccaaaaacgaatccatcccaaattctcaggaactttaaaaacataattaagaaaaaaatcctattattcgttttttttttctcaattgccaaatgaaattgaagttctagatttatctctctagaaagcaaaagggatatctatattcaaaccatagactagtcttttcttaaacatatcatagccgttgctatgtcaagggtgcttcggctggtttgaaacagagttgccaccaattgcaatgaattgagaaaagatagcctgcctagtaatccctttcacattccattttactcttttttttccttccaagtaaccaacaacacaaaactgttctatgaatccaaacgtgccagttatccaagccatgtgggaaactctaagtgtagggtgtatcataagtggtagttgccttattgttcctacatagctgtgatgtaagagtctctttgaggatgctatgccacccttccccaactagctttgattggtcttgtggggtcttcaaaagccttaaccaaaaagggatagtaacattcaaaatggttaatgtttaatgcaccattttaccaacttaaaaatcgtgaccatattatgatgtaacaagtttaattttcctaagtcctatataagttcaacccttggctcaatctttcaacaattcagttgcttactaatactaatctcttaattctctttggccatttctttagtaacattaagataatgtattctgtggaaatggcaccttatggtagattcattgctaacattttgatagctgtgatgtttgtttgcttgttttttgtgaccaacattgtggcacaggattcagagattgctcctacaggtcaattggaggctggaactgggtttgatttgcctgtttctaaggtgatgatgtgttcttcagtgttggcatctcttttggcattcatgttgcagtgaattggaagacagtgggtttcaaatttgaacttgttggggataatcttactttgtatgtgggttaaaattcatatgtttatatatatactatatactatatgtttggttgttgaaaatggtactgtatttttgggcattttgtaagattagctttatgaggagctacagttacaagtatgtaatttctactcagctattattggtgtgagctgatatattaatataattgttaagttccttg

SEQ ID NO: 770 - DNA, 1600 bp, Artificial
  synthetic
caaaatggtccaaattaaatattgtcattcttatatttcttgttacatctctaaagagctaagctacatttataactcacaatcaacgaaataaataattaaaaaaatgacttaagtatgtttgtagtccttaaagttttggaccgggagtaaatctattttggattcttaaattgaaaaaataaaaaatattttaatcctcaaatttcaaaaaatatgtttttagtcgttggatgccaacaacctcgacaaaagtgatccattttcaaataccaaagtcatcacttccgttaacacagtctagctccatggattaaaattgtacttttaaaatgagactgaaatgattttattttattttctaaatttggagagccaaaaacgaatccatcccaaattctcaggaactttaaaaacataattaagaaaaaaatcctattattcgttttttttttctcaattgccaaatgaaattgaagttctagatttatctctctagaaagcaaaagggatatctatattcaaaccatagactagtcttttcttaaacatatcatagccgttgctatgtcaagggtgcttcggctggtttgaaacagagttgccaccaattgcaatgaattgagaaaagatagcctgcctagtaatccctttcacattccattttactcttttttttccttccaagtaaccaacaacacaaaactgttctatgaatccaaacgtgccagttatccaagccatgtgggaaactctaagtgtagggtgtatcataagtggtagttgccttattgttcctacatagctgtgatgtaagagtctctttgaggatgctatgccacccttccccaactagctttgattggtcttgtggggtcttcaaaagccttaaccaaaaagggatagtaacattcaaaatggttaatgtttaatgcaccattttaccaacttaaaaatcgtgacgtaagcgcttacgtaagcgcttacgtaagcgcttaccatattatgatgtaacaagtttaattttcctaagtcctatataagttcaacccttggctcaatctttcaacaattcagttgcttactaatactaatctcttaattctctttggccatttctttagtaacattaagataatgtattctgtggaaatggcaccttatggtagattcattgctaacattttgatagctgtgatgtttgtttgcttgttttttgtgaccaacattgtggcacaggattcagagattgctcctacaggtcaattggaggctggaactgggtttgatttgcctgtttctaaggtgatgatgtgttcttcagtgttggcatctcttttggcattcatgttgcagtgaattggaagacagtgggtttcaaatttgaacttgttggggataatcttactttgtatgtgggttaaaattcatatgtttatatatatactatatactatatgtttggttgttgaaaatggtactgtatttttgggcattttgtaagattagctttatgaggagctacagttacaagtatgtaatttctactcagctattattggtgtgagctgatatattaatataattgttaagttccttg

SEQ ID NO: 771 - DNA, 27 bp, Artificial
  synthetic
tttcctaagtcctatataagttcaacc

SEQ ID NO: 772 - DNA, 27 bp, Artificial
  synthetic
tttaccaacttaaaaatcgtgaccata

SEQ ID NO: 773 - DNA, 27 bp, Artificial
  synthetic
tttgaagaccccacaagaccaatcaaa

SEQ ID NO: 774 - DNA, 27 bp, Artificial
  synthetic
tttgaggatgctatgccacccttcccc

SEQ ID NO: 775 - DNA, 27 bp, Artificial
  synthetic
tttcccacatggcttggataactggca

SEQ ID NO: 776 - DNA, 27 bp, Artificial
  synthetic
tttgtgttgttggttacttggaaggaa

SEQ ID NO: 777 - DNA, 27 bp, Artificial
  synthetic
tttccttccaagtaaccaacaacacaa

SEQ ID NO: 778 - DNA, 27 bp, Artificial
  synthetic
tttctcaattcattgcaattggtggca

SEQ ID NO: 779 - DNA, 27 bp, Artificial
  synthetic
tttgaaacagagttgccaccaattgca

SEQ ID NO: 780 - DNA, 27 bp, Artificial
  synthetic
tttcaaaccagccgaagcacccttgac

SEQ ID NO: 781 - DNA, 27 bp, Artificial
  synthetic
tttcttaaacatatcatagccgttgct

We claim:

1. A modified soybean plant comprising at least one targeted modification in an endogenous GmDR1 gene resulting in increased expression of the endogenous GmDR1 gene relative to a reference plant lacking the modification, wherein the targeted modification in the GmDR1 gene comprises an insertion, replacement, and/or deletion of one or more nucleotides in the GmDR1 gene, and wherein the increase of expression in the GmDR1 gene results in an improvement in resistance to a pest or pathogen in the modified soybean plant relative to the reference plant lacking the modification.

2. The modified soybean plant of claim 1, wherein the endogenous GmDR1 gene comprises the DNA molecule set forth in SEQ ID NO: 762 or an allelic variant thereof.

3. The modified soybean plant of claim 1, wherein the pest is a soybean aphid, a spider mite, or a soybean cyst nematode.

4. The modified soybean plant of claim 1, wherein the pathogen is Fusarium virguliforme, Pseudomonas syringae, Pseudomonas sojae, or soybean mosaic virus.

5. The modified soybean plant of claim 1, wherein the target modification is located within a GmDR1 promoter or 5′ untranslated region (5′ UTR) set forth in SEQ ID NO: 764 or in an allelic variant of the promoter or 5′ UTR.

6. The modified soybean plant of claim 5, wherein the target modification(s) are located within a GmDR1 promoter of SEQ ID NO: 764 or in an allelic variant thereof at a position corresponding to: (a) nucleotides 1-40 of SEQ ID NO: 764, (b) nucleotides 20-60 of SEQ ID NO: 764; (c) nucleotides 41-80 of SEQ ID NO: 764; (d) nucleotides 61-100 of SEQ ID NO:764; (e) nucleotides 81-120 of SEQ ID NO: 764; (f) nucleotides 101-140 of SEQ ID NO: 764; (g) nucleotides 121-160 of SEQ ID NO: 764; (h) nucleotides 141-180 of SEQ ID NO: 764; (i) nucleotides 161-200 of SEQ ID NO:764; (j) nucleotides 181-220 of SEQ ID NO: 764; (k) nucleotides 201-240 of SEQ ID NO: 764; (l) nucleotides 221-260 of SEQ ID NO:764; (m) nucleotides 241-280 of SEQ ID NO: 764; (n) nucleotides 261-300 of SEQ ID NO: 764; (o) nucleotides 281-320 of SEQ ID NO: 764; (p) nucleotides 301-340 of SEQ ID NO: 764; (q) nucleotides 321-360 of SEQ ID NO:764; (r) nucleotides 341-380 of SEQ ID NO: 764; (s) nucleotides 361-400 of SEQ ID NO:764; (t) nucleotides 381-420 of SEQ ID NO: 764; (u) nucleotides 401-440 of SEQ ID NO: 764; (v) nucleotides 421-460 of SEQ ID NO:764; (w) nucleotides 441-480 of SEQ ID NO: 764; (x) nucleotides 461-500 of SEQ ID NO: 764, and/or (y) nucleotides 481-516 of SEQ ID NO: 764.

7. The modified soybean plant of claim 5, wherein the target modification(s) are located within a GmDR1 5′ UTR of SEQ ID NO: 764 or in an allelic variant thereof at a position corresponding to: (a) nucleotides 520-540 of SEQ ID NO: 764; (b) nucleotides 530-550 of SEQ ID NO: 764; (c) nucleotides 541-560 of SEQ ID NO: 764; (d) nucleotides 551-570 of SEQ ID NO:764; and/or (e) nucleotides 561-583 of SEQ ID NO: 764, (f) nucleotides 101-140 of SEQ ID NO: 764; and/or (g) nucleotides 121-160 of SEQ ID NO: 764.

8. The modified soybean plant of any one of claims 1 to 7, wherein the targeted modification results in introduction of a regulatory sequence set forth in Table 9 in the GmDR1 gene which provides for increased expression of the GmDR1 gene in comparison to a GmDR1 lacking the regulatory sequence and/or wherein the soybean plant further comprises a targeted modification in at least one gene selected from Table 10 or in a regulatory sequence affecting the expression of the gene from Table 10, optionally wherein the gene is associated with a trait, and wherein the trait is selected from the group consisting of abiotic stress, architecture, biotic stress, nutrient use efficiency, photosynthesis, resource partitioning, and senescence, and wherein the modification improves the trait in a cell comprising the modification relative to a cell lacking the modification, or in a plant grown from a cell comprising the modification relative to a plant lacking the modification, and/or optionally wherein the targeted modification results in increased expression of the gene of Table 10; decreased expression of the gene of Table 10; a change in the coding sequence of the modified gene of Table 10; a change in expression or activity of the modified gene of Table 10; or a change in expression, stability or activity of a protein or mRNA encoded by the modified gene of Table 10.

9. The modified soybean plant of claim 8, wherein the regulatory sequence comprises at least one enhancer element of SEQ ID NO: 183, SEQ ID NO: 184, or functional equivalent thereof.

10. The modified soybean plant of claim 9, wherein the targeted modification in an endogenous GmDR1 gene comprises the modified GmDR1 gene of SEQ ID NO: 770 or an allelic variant thereof; or wherein at least one enhancer element of SEQ ID NO: 184 or a trimer of SEQ ID NO: 184 is introduced: (i) at residues 130 to 157, 300 to 306, and/or 520 to 525 of SEQ ID NO:764 or in a corresponding position in an allelic variant thereof; (ii) between residues 441 to 450 of SEQ ID NO: 764 or in a corresponding position in an allelic variant thereof, wherein one or more of residues 441 to 450 are optionally deleted; (iii) between residues 445 and 446 of SEQ ID NO: 764 or in a corresponding position in an allelic variant thereof, or (iv) with a CRISPR-Cas nuclease and a guide RNA targeted to any one of SEQ ID NOs: 771-781.

11. A modified soybean plant cell containing a chromosome comprising the targeted modification(s) in the endogenous GmDR1 gene set forth in any one of claims 1 to 10.

12. A tissue culture of regenerable cells comprising the modified soybean plant cell of claim 11.

13. A modified soybean plant part containing a chromosome comprising the targeted modification(s) in the endogenous GmDR1 gene set forth in any one of claims 1 to 10.

14. The modified soybean plant part of claim 13, wherein the plant part is a leaf, stem, root, pod, or seed, optionally wherein said seed is coated with an insecticide, a fungicide, and/or a nematocide.

15. Soybean seed meal comprising a DNA molecule containing the targeted modification(s) in the endogenous GmDR1 gene set forth in any one of claims 1 to 10, optionally wherein the seed meal is non-regenerable.

16. The soybean seed meal of claim 15, wherein mycotoxin content of the meal is reduced in comparison to meal obtained from a reference plant lacking the modification and optionally wherein the mycotoxin is an aflatoxin, a fumonisin, an ochratoxin, a trichothecene, citrinin, zearalenone, or an Alternaria toxin.

17. A DNA molecule comprising the modified endogenous soybean GmDR1 gene containing the targeted modification(s) in the endogenous GmDR1 gene set forth in any one of claims 1 to 10 and at least 100 base pairs of adjoining endogenous soybean chromosomal DNA located centromere-proximal and telomere-proximal to the modified endogenous soybean GmDR1 gene.

18. A biological sample comprising the DNA molecule of claim 17.

19. A method of soybean seed production, said method comprising crossing the modified soybean plant of any one of claims 1 to 10 with a second soybean plant to produce soybean seed and optionally harvesting the seed.

20. A method of soybean seed production, said method comprising allowing to self or selfing the modified soybean plant of any one of claims 1 to 10 to produce plant seed and optionally harvesting the seed.

21. A method of producing a plant comprising an added desired trait, said method comprising introducing a transgene conferring the desired trait into the modified soybean plant of any one of claims 1 to 10.

22. A method of producing a commodity soybean plant product, said method comprising processing a modified soybean seed obtained from the modified soybean plant of any one of claims 1 to 10 and recovering the commodity plant product from the processed plant or seed.

23. The method of claim 22, commodity plant product is seed meal, starch, silage, oil, or protein.

24. The method of claim 22 or 23, wherein the commodity plant product comprises a detectable amount of a DNA molecule comprising the modified endogenous soybean GmDR1 gene containing the targeted modification(s) in the endogenous GmDR1 gene and at least 100 base pairs of adjoining endogenous soybean chromosomal DNA located centromere-proximal and telomere-proximal to the modified endogenous soybean GmDR1 gene.

25. The method of claim 22 or 23, wherein the mycotoxin content of the commodity product is reduced in comparison to a commodity product obtained from a reference plant lacking the modification and optionally wherein the mycotoxin is an aflatoxin, a fumonisin, an ochratoxin, a trichothecene, citrinin, zearalenone, or an Alternaria toxin.

26. A method of producing soybean plant material, the method comprising growing the soybean plant of any one of claims 1 to 10.

27. The method of claim 26, wherein growing comprises at least one of sowing a soybean seed which germinates and forms the soybean plant, irrigating the soybean seed or plant, and/or treating the soybean plant or the soybean seed with a biological agent, herbicide, insecticide, or fungicide.

28. A method of producing plant material, the method comprising:
(a) providing the modified soybean plant of any one of claims 1 to 10; and,
(b) growing the modified soybean plant under conditions that allow for expression of the endogenous soybean GmDR1 gene at levels that exceed expression levels of the endogenous soybean GmDR1 gene in a reference soybean plant which lacks the modifications.

29. The method of claim 28, wherein the plant material comprises a seed, optionally wherein the method further comprises harvesting the seed from the plant.

30. A method of producing a treated soybean plant seed comprising contacting a soybean seed containing a chromosome comprising the targeted modification(s) in the endogenous GmDR1 gene set forth in any one of claims 1 to 10 with a composition comprising a biological agent, insecticide, or fungicide.

31. A method of identifying a biological sample comprising a DNA molecule containing the targeted modification(s) in the endogenous GmDR1 gene set forth in any one of claims 1 to 10, comprising the step of detecting the presence of the DNA molecule in the biological sample.

32. A method of increasing the expression of an endogenous GmDR1 gene in a soybean plant, the method comprising introducing the targeted modification(s) in the endogenous GmDR1 gene set forth in any one of claims 1 to 10.

33. Use of the modified soybean plant of any one of claims 1 to 10, seed obtained therefrom, or a seed of claim 14 to: (a) grow a soybean plant with improved pest and/or plant pathogen resistance in comparison to a soybean plant lacking the modification; (b) harvest a lot of soybean plant seed comprising the targeted modifications; (c) produce a commodity product; or (d) breed soybean plants with improved pest and/or plant pathogen resistance in comparison to a soybean plant lacking the modification.
